United States Patent Application Publication US 2019/0183130 A1 - sequence listing, part 13

SEQ ID NO: 2 - DNA, 21303856 bp, Cryptococcus oierenis (residues 3,873,431-5,810,145 of 21,303,856)
acgcaacccccgagttcacgccatgtctcatgttcttggaggtccacgtgccgcctacggaaacgtctcaggcttgatacttgacttcggttggaaatagctggagaagtcatacctgatctaaagctgtacaggctttcacccttccgagaacaacgatcgaccacactggaagagacctggcaagtttcttgaactcagccagagtaggtctgcttcagcttaaaaggcatgtgctagatgaatttactaaaaagtcctctctcgttcaggacgcaatggttcaatggtagaatgatcgccttccatcatgtttggattgccagcgatcgacccgtgttcgattcacggttgcgtcagctctttttgcatgctagtgatcatttttggtttgtctgactgccgcatcgctacccccaagcaattccggtagaagatgtctgccgacgtgcatgatgggttctgcggagacccaagtcgttcatcatgaagcgcaccatccgaccacgtcgtacgcgatgggtgacaatcgtttcaggttggaacggttcgatcaatcgcgcgcgtttcacagacgaggggtcggctacgacgtcgatccttcttcaagccaatcctaaacattgttatgctttggccttaatttcttcctactgctgtcagcactgccgctcgtcctgaacttgctgttgtttgttacgacgaaccgaaggcctctacgcttttgtttgcctgtattgagtcccgtcaggcggccgatatcgccttttgacagaaggttgcgcgctatgacctggatcctcctgagatcagtttttcgatgtcgaggaatatttgacaacttgacgcttgttgattgttgaacgtaccggcagaaggtgtgcagctacttcgtctgtatttcaccccggcaacaggcatgcgaaggatttggatacctgcatgaagccgcaaatggccagagtggcttggcaaccagtccaagagtgatacttcccgaatgtgcaagcggttattcatgcgatcgaaacgtgagtaccggttgcacgatcacgctcgcatggaacagagacgcagcttcgttccgcacatttgagagctggatctggcggaccctgacgattgtcgtaacggcaggcatgttaaatacaccatagcagaatcacagcacatacggaggtcggcatgaggatgtacgtacaccaccattgactgatgtaactccattccataatagagctggaaatctggtctcgaggcaagtccggccatgcttcgatcatctacctcgtccattgcgaaggtttgctttccttcgcctgctgtcaacgtgaacaagcgaaggacaatcagccgcgcatttcagagtacacacccctgactgatagctagcaatgctgtagacgtcgttgagacttgacaaccaagggagcacaacatctcaatcgggctcctgctccgacgtgtttcggtgtagcttgcctttcaccatatagcgaatgcaaccttccgctatccagactgcacaggaaagatgtacaccattggtatgagtcggctcaaacaacattcagatgatttctgcagcgaaatcggaactccatgactgcgggcttccacgactggtaaccggtacgcagagactgactgcaaatatcttgtgagatcaactttcttgcgatttgagcagctgccccacgccgacagcacaatatcgaatgaggcgggaacaccatgcatgcatggtataaggattggcactgatgtataccaatgagcacaggggaaacgcctgccttccagaccatgatggttatttgaggaaacatctgacggagcccatttgtgctgaatatgatgcacgagtaaccttgactgtgggccggaagggcgataaagatacatgtaaatcgttgcgccgatatgcttcatagcgtccccagccggtgtctggcccgccttttctcccctaatcttctcttgatctcggaaccggaacggcctcctctcgctcatccttccttcgaggaggacttgcgcttctacgatggggttcgcggctcgtgcttcgcgcacggcgggtcctcgagggggacctcgaccgggagtctcgcctctttgagtttcgttttcgtcgaggaggcgagtcggatcgggaggagatggaagatgccgagtcggagtcggaatcagagtcagagtcggacgagccagaggaagagtcgctatcgctatcgctgtcgctacccgaggatgatgatgagctgtgagtgtaggggcgagtcagtacagtcgatagtaaccggacaatgcattcgcactaggatatgtatatatgccgatactcacgaagaagatcttcgtctctgtttcttgtccttcttcctcttgtcatccaataatcgttgagcctcccgttcagccaagatcttgtctgccagcccttttctgtagatgtgaaatcctcctgatgagcgaccaggaaggacgacatgtcaggctacagcccgttgcttacttggttctgaattcgtcaggcaattcgatagtaggcccatctcccaatctctttgtatcgccaatcctcaaatccttctctagacgctgacttcggctcaacctgggtacatatggtcttggattcttgcattgatacgtgtagtgacccttgagagtgcatttctggtagcaagagcgaatcgagttgaatgctcagtctctctgaggactttgaccaggctaggtatatggctggacgattctggacttacctgacagacggtcgagggcggtgccttgtccgttcgttgcagttgctttggccggttgaatgaggacatctcgtcgctatcacggcgttcctgatttcgctatcggtaacgggtcggattcagttgcgtaaaaatagctctagcgagtattgcggatgattcgcacacgatatgctactgataccactatgacctaacgagatgatcatggtgcgggttgtgtagagttgtgatcgccggtgggtgtacctcggtctgcgttgcgtgaaggggggagaaccaagtggaagatcgtaaaggatcaggtcacgaatcgttcacggggaatagctaggtagagattgagcacctggtcagtctcgtatcacaaaactgagcctcacgcaagcaggtattaccacgagaaacaccaggatagcatctgggacaacagatcatagctcataatgtctgcagagcacaagggcagtggtcaggagtcggaggatttcattcaccatgtggcgatcgaggtaagacgagacttaggccagaccaacatgcatgagctcatgcaaagctcgaattcctcgatagctctcacgacggctcaacacggtcaatcccaacgacttgctagccaagcgtgtaatagatatcgctcgacacaaccattccggtgacgcattcagcaaggccgcttcttcgtttggcaaattcgacaaggactttctgctctccctgcactcggaaatcctagcgcatctctcggcagtctctcacagctcgcacggggagaatggagctggaccctccatggagcgaggcaatgctcatgtcggcaacgacatggataagttggatgacgggatgacgcacgagtcgggagacgttcaacccgcagcgtccaggcaacgaggcgggcttatccgaaccggcgatgtaagttgctgctattgctaactgttggaacgacccacaagcggacactgatcgatgttccacatgatagcatactttcaaagttcctggagctcaaccccgagcgtctctgctgggtttggacaaactcgccgcggaaaagagagccgcctctgcgtcaagctcgtcgaccgaccagcaagcgagcaagcgacaacgattggacaaggatagtgccgaggttgcagataggaactcggggggtgtattcaagagtgagcatacgtctcacctgttcatctgggtcgtgatacgggctgatatctcttctggctcagtcccggctctgccgatcaggaaggataacatccgacaacgtgtcccggagacccctacccataccggtggacttcccagcgcagctcgagaagctctggcagctcgtctcaagtcgagaaacatgcccaccaacctggctgtcggaggatccttagcattgtcagcggacacgagggagattcgggatagtcggcctggcgagaagggtctgggagaatttgcaaggcgaggaaaccggggtctcaaccgggaagagcggaattacgacagggatagacgggacgatcgagaccatcggggtactcggagggacgatcgagagcgtcgggatccaggtcgaccaaaggattggaatgatgcacctacgccccgcaccaaccggaacgatcgggattacgatggtgggagcatgcgtgtgcctaatcgtgcttgggacgagacccctcgagcgggaggacgaggtggagagacccctggcagagggccgagtcgggcatgggacgcaccgacaccgaggcggaacgctcgcggcggtgacgcctcaccagatggagatggcatgcatttcgatgccaaagaatgggaagaagaacaggtccggctggatcgggactggtacagcacgtacgacgaaggagctgttgtgagtcgagatgtgatcatttcgctctctcgctgtgctgaccaccgagatcaggcaggagacgaggaacacaacccattcgccggatatgaagacgtgactcgagagcaggaggcacagatgcaggccaagcaggcgaagaaaatgacggccaagcaagctcaatgggtaagccatagaggctgaaccaactcagatcacacgtgctgacgaaagctgcccgtaatacagaacgctgatacagacgcgtgggagaacaatcgaatgatgacgtccggagtcatgactaggggtatggtcgatctcgatttcgaggacgattccggatctcgagtacacgtcttggtgcatgacatcaagcctcccttcctcgacggacgggtcgcctacacccgacaattggaccctatcagcccgattcgagatccgacgagcgatctagccattttcagcaaaaaaggaagtgcactagtcagagagaagcgggaacagcaagaacgagccaaggtcagcccgcgacgccgtataccttgccttcaatagaccctgatttcgaattgtcataggccgccgccaaaatggcagccgtaggcgggacgactctcggtaacatcatgggggtgaaagacgaaccgaatctcggagcagaaggccagaggaacgacgtcgacgagaccaattacaaggcggattcgcaattcgcgtcccatatgaagaagtcggaaggaagctctaactttgccaggaccaggaccttgaaggaacagcgggagtaccttccggcctttgcagtgcgcgaggatctgatgaagaccattcgcgagaatcaaggttagtcaccagtcgtcatggtagctgtcggatgactaagagctgatatcccgtcttttcttacagtcactatcgttgtcggagagactggttctggaaagaccacccaactcgcccagttcttgtacgaagatggctactgtaaccatggaatcatcggttgcactcagccccgaagagtagcagcaatgtcggtagcaaagcgagtcagcgaggagatggaggtgagcgttgcctgatgtccagtcaaggtgaactctccactgacaaccgtcatgtcagtgcgaactgggtgctaccgttggatatgctattcgtttcgaggacgtaacatcgaaagcgaccaaaatcaaatgtcggtcacgcttttcgggtcttaatgagactgacagcagctgagagattgataaatagacatgaccgacggcgtgctgttgcgagaatcgctaaatgaaggggacctggatcggtacaccgtgatcatcctggatgaagcgcacgaacgttcactgagtaccgacgtcctaatgggtctcctaaggaagagtgagttcgccttctattttcattcgagacttgatcgctgacgaggaggttcgcggcagtcttgatgcgtcggcgagatctcaaattgatcgtgacttctgctaccatgaacgcagagaaggtgaggtcttggtgtcaatttgaaagctggaacgtggcaagcttacgagtgaatacattatgttcagttttccaacttttacggacacgctcctacattcacaatcccgggtcgtactttccccgtcgagacgtttcacagcaagtcgccctgtgaggactatgttgacagtgccatcaagcaagtgcttcagatccatctgtcgagcccacaaggcgatatcctcgtcttcatgaccggtcaagaggatatcgaggtgacatgcgctgttatcgatggtgagcaccccgagccgtgcgttacaagcgacaatcacttacttgagattgttcctgcatcagaacgactaaatcaactagaagatccggaacctctggcgattctacctatctactctcaaatgccggcagatctgcaagccaaaatctttcagcccacaccagatggccgtagaaaagtagtcgtcgccaccaacatcgcggaaacctcgctgacgggtgaggcgcgtcggatttggtagcgatatctaccacatcgctaaatggtttctcgttgcagttgacggtatcctttatgtcgtggactcgggatactcgaagctaaagatgtataaccctcgtgtcggtatggatgccttgcaaatcacgcccatcagtcaagcgaattgcggacaacgtaccggacgtgccggacgaacgggaccagggtacgctcgacgtgacaggagggtcaagactctggactgatacttgcttttccaatggtagcttttgttaccgactgttcacacagactgctttcgaaaacgagttgttccccagcaacatcccggagatccagcgaacaaatttggcaaacacggtactgcttctaaaatcgcttggtgtaaagaaccttttggagttcgactttatggatccacctcctcaagtacgtagatttgccagatatagatagtgacaccgggaacgctcactctggccgcgtctctacaggaaaacattttgaactcaatgtaccagctttgggtgctcggtgcgctggacaacatcggagacctgaccaaggatgggaaacgcatgtccgactttcctatggagccctcgctggcgaagatgctcatcacagcgtctgagtacaagtgtgctgccgaaatgttgaccatcgtctcgatgctgtcggtgccgtcagtattctatcgaccaaaggagagacaagaagaaagtgacgccgccagggagaagtttttcgtgccggaaagtgatcacttgacgcttctgcacgtgtatcagcagtggaagagtcatgggtacgcatctatccggtcggaaggtgatctattagcatgctaatcgtcggtaccgccgcagattccgcgacgattggtgcgtgaagcactttttgcaccccaagctcttacgcaaggcgcgggaagtacgtgggcagctggaagacatcatgaagacccaaaagatggattttacttctaccgtagggacagattgggacatcatcaggttggtcttagtcgactttacagtcccaccgctaagacgactgatgatctttcccaaaacctgtaggaaatgtatcacggcaggttactttcaccaggcagctcgtgtcaagggtatcggcgaatacgtcaatatcagaacaggggtacgtagccatcaaccgaggacttgagccgtcatgttaacagtatgcttctttcgaaaaggttccttgtatcttgcatccgacatcggcgctttcgggattgggctaccagccagactttgttatttatcacgaacgtgagtctttttgaccggaatgtagagtaccagcggtcgatctgaagcggttcgtatgttttatagtggtcatgacgtccaaacgtaagttctgctgtattgcttggctgtgctactcggaactgacactacctctatggcatacgcagaatacatgatgtgtgtcacatcagtcacggccgaatggctggcagatctgggaggggtcttttacagtatccgtgaacgcaatgtcgatggactcgcccatgctcgagcgtcgagagacttttccaagaaggcagagattgagcaggagatggccgaccagagagagaagtgagcaatcgctaggagcacctgcccacgtagtcgaacaagcgcttaatgaggcttgaattgctttttcaacaggagggagcgggatcgggtgttggaccttgaaaaggcggcaacggcggcgaggacccctaggatcgcgggaccaggaatgacacccagacgttcggccggtattggagctgcctcacgtgcaggttcagcgactcccagacgtatggccggaatatagtgacctatttgctgtacttgattcccccagagaccgaacgccgagatcgtcgtcatggatcatggatcatgcgtcattggtcatccagggacctgtgggttgcagcataccgaccgtgtctcatgtacgcaccacttcgatgcccgtcgaatcgccctgaacgtttgacaagccggaccaatcgccgccgagggctccgagattccagccgtgacgtcgttcataccgatagagaagcggagcgggttttcaatcgcgcatgaaacgcggctacaacctttttcgcttgatcgcttgcaaagctgcgatgtgaccagaaggccataagccacctacgtcatcgaagcgatggttgataactgctgaactgcctcgtgggtggctgccgcgcgtcgccgaaaggaacggggctctgcatgacacggcagtgaaggagcagcgagatcgacattgactacgccattcttctaagcatgaaatcattgcgtcattgatcaaggcccgagaggcagcgagacaccgcggaaggagggaggctcgtcattgcttttggatcgccgtcgtcgtcgtcatgttcaatcagtctcagacgctgccgattctgccctgccccgtgttgcttgctgtctttgaaagccactctcgctcatccatggaagggggagttgatccgagcacatagagagagtggcagcaagtacagacttcgacactgcttgctttaccttggggataccgccattctccacgacgacaacctttaagacatcgacatcacagacctatccttgtcgaggtccacatcgaagaggttgcaacccccgaaccacagaccgagaacgatagcttagcaataaatagcgacattcgcccggttactactgcaaccactggaacggaaaacgtcgcaagccaaacgtcatcgtcatcggacttcttataaagcgaaatctcctggtaatcgatcgcccctgaaggataccatctccttgacaactcgatctaggtccaatcactctttctctctataaccacctctcccacttcgattcggttccagcccgaaccttcccattcagcgacaagtttgcccatcatgcctggaggtggagtagtcattgacgcattcaagagtacgcactgagctcactccagattcgcttgacgccagacatctgacccacacgttcgcatttcaatcagacctgatccgtcacggcaagaacgcccagccatcgtctaccccagcacctgctcaacctaccaacgcctcgacctcgggtcatcactcgcgtcaacaacaagagtacgctcaggcccaacaaccacaagtacagcagcaacaacaagcaggatacggtggtggtggcgtacaaggatacagcggacagaaccgtcaacaaggtcaagccatgaatgacaatttgcaaggtgcgttcagtcagatgagaaatcatggtcacgcgaaaagtttttggggggtgcgaggggtcccgtcgcttgggtagaccgattctgcacaacgctacgcctcgtatgccctggcgacgttcctttcgcgagatcatcgtttcaagtcgagacatcgtgatgctaacaaatgacgtcaatctccctttcatccattctctcatcaatcatctcggttgcatatccatcacgtccgatatatctttcaaaccatctgggaaaacgctatcgtcacactcggatgtgatccaacgtacactgtggtcacaacatacacaacaatttgccaaccccgtgcacgatgcctttcttgcggtccctcgcctcgtccaaccccatcacccggatgaacggacttgaactcacatcgaccataacaacagcccctcagcatcaggccgcccagcagcaaaaccaggcacctttagcatcgcccgattaccaccgggaggcccagcagatcgtcaaggaggaacgagagcagagggaaaaaatgcccaactaccccgtaagctcatgctagcagaccaaggacaactgatagcaaacgctgatcaatcaatcaattgcccatctcacagggccttgagggcttcaagctcgtcgagaagatgggagacggcgctttctccaacgtgtacaaggctatcgacgggactagtggacagaaggtggctggtgggtagtcttgttgtcgacttgccacggatcactcgctaatctttcgcttccacgcatgatagtcaaggtcgtcaggaagtacgagctcaacgctagccaggcaagtcattgtcttcccgtcttatcagatcgtctcgtctccagtgagagcaagaggcaagagtatacttggcgaggtggtttgggtctcgagtaaacacacttttgcactgcatctgtctctgtcctctgccttttctgctagctcgccaacttccgtatactcttggcctccttgctgggactggacggggccgacggagacgagcaaatttgcgatcagatggctgatcgtcccctactccctatccgcttcttccgttttccttcacgcctggtatcgttctcccaacccaccacgtctccttaaatagtccggtaacaagcacttgaaccccaacttcaagaagaggccgagagttacggaggttggtgttgcagtcccgttacggcctccccccctcgtgatgccagagtttgcgacgatttctctccatctcgtttcagactctggggtccggtatatccaaatcaatgaagctgacatgctttgccttctttccattctagcgtgccaacatcctcaaagaggttcagatcatgcgtggtaccaatcatcccaacatcatcaagttgatcagctttagcgagagtgaagagcactactttttggtacttgaactcatggaaggtggagagctcttccatcagatgtgagttcaatcgtttactcgattctgcaaacggaatttcaaaacttatccttgcctacaacccaatagtgtcaagttgacgtactttagtgaagagctctcaaggcacgtcatcatgcaagtcgccgacggtatccgttacttgcacgaagttcgaggagttgtccaccggtaagtcaactatctcctgagaccagacctctcttgacaactgatgaatcctcttctgtgctacagagacatcaagcctgagaacttgctgttcgagcgaatccccattgtcccgtccaagcaccctatccagcgaccttatgacgaggagaaggaggatgaaggtcaatttgttcacggtcgaggcggtggtggaatcggtctcgtcaagattgccgatttcggtctgtccaagatcgtctgggacgaagtgacccagactccatgtggtaccgtcggttacactgcccctgagatcgtcaaggatgagaggtactcgaagtcggtcgacatgtgggcgttgggatgtgtcctctacaccttgctttgtggtttccctcgtgagtgcgaagttgtagctgttctcaaccaaagaccgacttgctaacttttgttcgccactccttcgatagctttctacgatgagagtatcagcgttttgaccgaaaaggtcgctcgtggttactacaccttcctcagcccttggtgggacgatatctcgcactcgggtgagtactttcgcgagatgagtattcatatgcgccgattctcattagctttccccatcgcagccaaggacctcatcacccacttgctttgcgtcgaccctacccagcgatacactatcgacgagttcttggctcacccgtggtgtaacgagaagcccgccggagccgccgcgcccaagtcgcaccctcctaccactgcttccaacatccccatcgactcgcctctgctcgcatccgtccgcgctggcaaccgtgagggacgttctcccggtgtcagtgcattgaaggaggccttcgacgtcacctatgctgtccatcgaatggaagaggaaggtggacacaggcgcggtgttggagccaacgtacccggaggtgctgggcgaggatttatgcaggagctcaacgaggaggacgaggacatggacgaggagtcgcagatcgagcatgctcgacggaagcacggcgaggtcgtcgctcgaacaatcaacgaacaccgagaccgggcaaaggcgcaagccgcagccggagtcaactctgcgccttcatcgaaacactaccagggacgtggcggtgctgatcgacgacaagctgaagccgctctgtatgacggtcgtgctggacagcgagaccgtggccgaggcagtggcactagcaaagctactttcgacctcaacatggatgccgcgacccttctcggccgcaggaagaagcccatcggcgaatcgccattggccaagcaggtgttgatgaacagcacgccggccagtcccatgcattactaaggggaccaaacaccctttacgccttccccatcacgcacccactattaccaccacctccacctttttacgacgtgtagaagaagagaacagtctcttcgacaagtgtagccctgtcctttcaagttttaatcctagtcggcccggacaccagacattttaatatcatggaaagcgccgccggaccgattcctggtgccatcgtagaatagtttgacgagacccgtcaggtcccccgaggcttaaaaccgtctttattgttgtcacccaatgtatcgaatagcacatttcgcattcttcctctctgaaggttgatagcttaactacggacatgcccatattagacatgtccattgcgcgtattccccttgctcactttgtaatttcaggtagtcccggatgctttggcctgcatggtcagaagccaaaagttcagttgatggtgtttagtcgaagtcgttcggtatccgtcacaacgatcacaacagctagacgaatcatacgactgcgactagaagcaatcatcatggctaaaacaaagcctgtccctgtcagtgtccccaaatcccgcgaaaccatcgagtcggatgtcgagatgaacagcgacaacttggacgagcaaagctcgagcgtggaaagtagttcggaggagagcagtagcagcgatgagggtgaaggcgacgatgtgcaacaaaatcctgccggaagctccacgaagccagctggtggcaaaaagaatggcaagtggccgtaagtcgggtgcgctggagccactctgctcgcgaagaagtgtaactaaattccgagccttgcattgcatcagagcctacgaacctccatcgggcatgaagactatgccagtcaacgtgactacggctgctagcgattttgaatggaacgagctggccaagcggtccggcgtcgagttatggtgcatgagagttccttccaccgtacgtatcagattgatcacacttggacaattcgcgagcctgaccatgagagagttgattattacagttcaaagctactcggctatcgaatcttcaattagatgcctcggctttgaaaaagggagtcaagccgacaaagaagccgctcggtaccttaaccaccagcaaaaacacgtaccatctcattccctcatcactcccttcggcatcctcttcttcttcgaacgatcttcccaaagatacgaacttggaccaggagcccgatcttcggccttctctggtcgactcgatgcttcctgctgatcaggtcggccgaggggctaggagcgctggggacaccgatagggatctcgagagggagggagctgtcaaggccgaattaggtcttgatggtagcaaggcagccggtgccgaggagatgcagggcctgaaattgatcgttcccgacgggagacgcgcgggtttctttttgggtgaatactcctagattgactcagccgtgttgtctcatgctaacgccccattgcccaacgtagctccgatccagcctactaggcacgtcatcctgaccccgttgatcggccctaccatcaatgtcgaaaactcgagcactcttgccaatcccaccacctctgaagcatcaggctcgacacctgcccccaaaaaccgtcaccctcagcctgccggcttgaagtaccgaaacatccccttcggtgccatcaacccaaacacctctcacctggttggaggccctggcaaggagggcggcaaggacacgctggtcacgccaagcgcgattggacgcgaatcggcatcagccgatgttgtcgcagattccccggccggaaagagcggcgagaagaaaaaggacaagaagaggaagtcgaccagtggcaagggtagggatggcgtagaagatcccgctgtggcggagaagcgagaaaaggacaaggacaaggagcgaaagcgaaaggtcgactcttcgggcggcgggaaatctaagagaaccaagactgaatagatgctactctcggctgtacttgggatttccgtgctaccagtatcatacaacgagcataacagagctatataggacgctacgcgagcacaccgtctttcttcagtctcttttcgaccaatgcgacatactgttccatgcctcggggaagaacgcgaactttaccggcaccgacccgatatgtggcgcccgtccgactctcctcggcatcgctatcgtcttcgctcgagacttcgtcttcgctgtcttgagctcgcgcatcggctttttcgccctctatcacgacccgattgaaccacctaagtcacgttcctggtcagtgcgtcgttcgcacccgcactcagcagcgtcctttcactcgcctgtcgtgggtgaccaacaccagtgtccctttgtacgacctgagagtctctcccagcgcttgcagagtcggcgagtcgatgtgtgtggtaatttcatcgagaacactgaataccggactgggtggtcagtggtagcacaataaatctccgtaaccgacaaacttacagcatgtgcggtcgtttccacacgatgagtgaaaacacaagtcgtacctgtttcaagcagctttgtcacttgaaggcgctcgaaacccgtagcagtcgtgcgtaccttttgtcctccggatagcaatgctacaggcgtttcactggccgtcttgccttgcaatccaaatgaagcgagacaggcccggatttcgccttcatcgatcgagcccctttccttttccatctcttgagcgaaatatcgaagcgcagtgagcatgggttccttgaccgccattctcgttaactcggagaccgagtcctgggaaaagtagccgatacgcatgagaggatggagtgtgatcttgcccgatgcgggtttcagttcgccgaggagaagtttaaccaaggtcgatttgccttgtccgttctacgagagggtttatgtcggtgagttcaatcaggtcaggtctgtaggatcgttccacttaccgcgccgatgaaggaacacctcccgccttgctctacagtaaagctgacaccttgcagtaaaggcttgcttgcaccgcggtatcgcacggatacgtcgtcgaaatgtacggcatcccctttggttttcaattcaggaggctccgggatcctgatcttgacgggaggttcgccttggtcaacggtgatctcggctcgtcggctggtatgatacccggcgaggtccctattcagtttaaacctgcctcccttggcgttttgctctaaaccccatcgttcgtcaagtcttataccgtgacatcgtcagtgaaggctcttctgatcgggatcgaatgttgacctactttttttgtctggactttgccatcttcattctgattacgcgtggggttcagatattgagctcatgctgactgataagatacagcagagtcatttacctgttgtcatccccagtcttcttggctgtcgccataccttgccgaatcgattgttgtatctgttttcctggcgcaacatgttccagcaccacccgcactcagtcattcacggacacaacgctcacatgctctttcttcttgtccatggcttcgctcatcgttttcatccgcctcgtcttcttcttctcttccacttgtagcgccgtcggggtcccatcaaagtattttaatccttgatcccggatgtagatggtctcctcgacgacattgtccagaaaatcttgatcgtgcgaggtaatgacgaccgtccgttccgaatcgtccgaagagagatgagactccaaccaaagggtagcttcgatatcctgaaacaagacgccgacaactaagttgggcgcgagtcgagttgccggacagccggtcagagaagagacttgccaggtaattgctcggttcgtcgagaagcaacacgtcgcttgaaaccaacaagctcttggcaagggagcacctactcttccatcctcccgacagagtctggtacggttgctgtatcatttccggcgagaaccctagtccgtgtagaatcttagacgcttgatgggtcatggaggcgatatccagctgtgtgtgacagggactgtcagccacgcgacgaacatacggtaaggtcagctagggaaagaggactgacagtgtcaagttgcaagttcaacgtggtcagcagagccaatgcctgatccatgacctgtacttcattgagctcatcccctgcggccgctccggtacgcacgccctcgagcctaagatgagatcgaccgtcaaccgtgacacaccatggcattttcacgtatcacggctcgacgcacctgtctttgaaatgggagacgttgttctccttcttgatgacttccagcctagccgctttccccctcgtcccgcttctcctcgctgcgatatccatggcgtccctcagctcgtcctcggcttctcttaaccagctttcgagcaggtgcaggtggacctgcttgacgtcttgctcggtgaggagtttattgagcacttgagccgaacacgagggacacgcatgtacatgtgtgatttcagcgagatgtcgatgggcacgctgtcgatcgaaaagcgcggtcgggggactcaccatcgtgtcgttcccggacgagcactttctccttgtcccccttgatcacgaagtcgagagccgaaggtctctctgggtcggacgggtcttggtccgtctcggcttctacctgggacaagaggaggatcttgatggatttggacagtcctgggatgaggtactgggaaagcgcctgaaacagagctttgacgaggaggaaggcgatggtggtgggggtggtgatggggtttcgtcagttgcattttaaacatgaatgagttggcaagacctttgtctcacttgatttcccagatccgtttctgtgagatcaaatacgggcttgattcagcactgtaaagtatatgagtagacctcgtgctcatgacgcatgacgcaccttccgatgagagcgtaccgacacccctctttcagcttgacgtcggtatccacgaggacctccttctccccgttcttgcccactgccaaggtcacacccttgagatcgatatccttgctcgtattaagagtatcgacgtggaatcgggattgttgagccgtagcatggatcgtcgtcgacaggtcgagcgaggcacggtccgtcacgatcgccgagctcttggacatggtgaaacgagactaagaatatgtggaggatggtatgacgatctggctgatggccagggtttcatatcagtgtccgggtcattggacttgggaatacggtgttatatagaggatacaacgggtatacctttgccgctacctatgaaaatgaaaagtctgactagggttgtgtctacctacagctctgaccgacgtccgatgatgtacctgccttgtaatgctcggagccgaccgaccgatcaattgcgaggtggaaatacaatgttgatgactagactgcgaccaaggtggatataacctgttgatctattcagggtggatataataacaacagatacagaatttgctgacgtcatgtttacgttgatggatcatctacttgggactgaactacttgcttgggtttacctcggaacgaacgtcggttcgatcgaatggatcaaaagggaaatatacatgtatctacctatctacgactcggtcaaacagcctctgtatcgagtccgcaagttgtcatcgcctgactgcaacgatcaacatttgcacgactacccaaccacacccctcgaccacctcctcgaaaccggcatcatggtgaccactcgatccaacaacaagtcatccaccgctacgacgagcaccaactcgcaatcggccaatcagccggaacgtgatcaacccaagatcgatcaggcgttgggtgcttcgggaggggagaccaagactaaaggcaaaaagagaaccgcgaaggacacacaggatgatgatgagaggaaagacgacgatgtcaaggtcgtgtccaaggaggacgtagaggaggagcacgcggacaagaagcgaaaggtcgaggacaaggagtcaacagtggattcgaagccttgcagcgaggaacagaaaaagaccgagtcatctgaatccgatgccaaacccgtcgtgcacgagcgatccgacaagtccgagatcaccgctgctgagaaagacctcaccaagcacgccgacgtgcttgaatacggtcggattcactttctttacaaaccccgcgtcgaggtcatgcacccttccgacatctctcaagttcagaggcttcacatcatccttcagcctcatgatgagaagcacccagagacgttcaaagaggatgggaagggggagaagaaacccgtcctctcccgtctgatcggggtggggagaaaggtcctccctgatgcggagaagaagagcgagggagcacctccacctccacagagcactggtggacaagggagaggaaacaatttgggacgaggtggacgacaaccgtgagtcacggcgcatgaggagcagaggtcaagctactgggttcctgatcgcgtgtgtgtgtggtcatacgggtgttgctagattctgggggttcgtctcggacgtcagcgagaacattgaagatctgcactctaggctagaagaggcgagtcgaggtcgtttccgccctttcccctcctgacaggtcaagtatgctgaccgcttccaaacgtacagaccaagaacgacaccaagaccaaaggcacccggacgaccgggcccgatcgtctcattgcctcgggcccatactgtatcctctcccacgcatccaccaagtctggagaagcaagttccaagacccccgaaggaaagggcgacccaccttctcgtcgggatactctgctcgtctacagcttgacgcttcccgtcgagatgggcgaggttcaagaggctttcaacttgagaaaagagggcgccttcagggtgagcgtcaagaatcccaagatcaacacgcctgttcccggtggagctgggaccggtctgaagcagaaagcagagtttccggaagaacgtaagtgcggagtcgtccgtcctgcctttgcccttggcgcgaattgagggatatatccctgaccatccgtccgtatgatcacgatcagtacaaaggtccatgggtgatctccgatggcatcctttgacacctccgacttatctcgactaccaacatgctgaattgctactcatcgctacccacccttctgacctgcccgagatcgccggcgaagaggtcctgcacgacatggaagagatcgccgacgagggcgacatggagcatctgaacaaggctgaagaagaacagatggagggagaagtcaaggccgagatctttgacatgttgaaagccagagaggataaaggtgtcgtcgtcggtggagacacggtaattaccggtgaatgggagtgagaagccgggaaaagcgttcaaatcggcaccgtatgagcgtcgtctatcatccgttgtatgatgttcagttgatctggcaaccgcagaagacgatcgacaagtcaaatattgtatagcaaatcaggtatataaggctatctctcatccccggcgtgttgatcaggagtccaaccgaccgacctcaagggcaacctggcctcagagtacaaacttgggagtacgaatgtcctcagaatacatggggatcaacctagcctgctaattggagtccgatcctactgccattgccagaagcttttctcgatatcgagaaggagtggaacccctctctcagcctcacggataaatccttgacacaagtacttacgctgtggcttctgaggcggactttggatattggcgagttccggatcgaatttcgggtcttgcgttgtaacaatggcgagctgagcagaccgagctccaatggcattgtgcggtatatcaccattcaccagaaagctgaccccctgaggcgaatttttgagacgtatttgttccgagactcgcgttcatgaccaacaactgctgcaacctcgatctcaaccagaaaaccgatctcaaaacctctgactgcttgcttcgaggatcgccacggacattcctgctcaacccgacgtagtctgatgcagcatggctggacagtaccgccgtcaagttgacatatctctgccgtggttcctggcgattattgcatgtttcgtcctacacgactttacagctacagcaagttaaccgtcgcttctcctcttcaactccctgaaggtctccttcgttgccaactgccgactttctcgtacagcctgctccaccttgcggatctcagcggcagtcagctaaatggcgacgaagacgtcaaagttagctaccgattcgcaagtcgtacgccgccgctacttacagcctctggcaaacccagagtcttgcagagatccacggcatgattttgcccaatcagaacatcagaagcctctgtggtcttgaagttcgtagcaaactcccgaatagtactctgggctgcctccagtacggctctgaccgcttccgccacctacaaaccgacatatcagcttggccaagcgggcaaatcagcatcgctttcatagactcactgcctggggcaccgttgatggagcagctcccttgccttttttgccagtcttgactttgaagggcgtcagagcgatttccagcatggcgaagcactgcaacggtgatgctgatgagcagaactctgactgtcaacatgaccgaagagctcacctccatcaacgaggcagctctttccatagattgtctgccgacctctttggtcgccaaagttgccaaagctagatggtcgaaacttcaattaaagagaaagcggcgtgacaacgattccggaaaagactcactcttcagcttctcaccgataacggagacgtcagccgtctctcctgagcggcaggatttggcaaatcgtccgatagcaagaccagtttcgaatgtcctgcggtcagtttcagatatctatgcaagaagatacgaaagtcagcccagcttctgctctacagcatggtctattgcggtctcacgtcgctctcgaccccaatgttgatatccaactcggatgcggggtcgaggattccagtccacaagtcggcacctgcgcgaactatagaaggctgatagggtctccaatgtcagacgagtcggctttcggtcgaagtgtccagatcagactcactgtggacagctcccccagctgggtctgttcaattaggcccacgtcgctctgagcggatccataatctgggaacaggtcccaatctcggatgtcgacagcgctttctgctttcaaatcactagtcagtagagtgatagagggataacaaccggaaatgaccatacacacctttgctgtacaaggatagattctgtatcgcaacagatctatctgccccgagaagttcgctcgagtctcgcatagcagagtgacggacgagttccagctcggtcaactggcgctgatgggaatgctggaacttgccaccgagttcgagcattgaaggaatctgaagtgaatcacgatcagtcaagactcgtcaagcgatccggacttcgtagccttacttgagagtacgcctcttcggtgaaagctgcgacgctagtctcgctcacatcaccctgagttttatcgtagacctgcttgcactgcagaagcagactggccaaggcagtcctggtcttctctccaccggccacatagtctggcgtcgacctctcggtcacgaagtgcaaagcagtgtcttgctggaacgttcgcatcttcaagggagcaatgtgctcgacgatcaaggagggcgcgccttgcattcgatcgcattttagtgtcggccctgctcgtaaagtcgactaagatgctcaccgattactctgtacaatcgtatcagaagcattcgtgcctgcccgtttgcgggactgtccttgagcacccgttccagcgtgattgccgctagaacgaggtatgcccttgcgtctgagcagaaggagccatcagtcttgctggctgagtcttgcagcaatattttagtagctaacctttcgcagccatgtctaatcgccaggcgttgatccaagcttgcgcagccatcaatccaaagtcatctgctggtcggacgtcggtaatgggaaggtctttgcctgtaaacgaaaatgagaagcgtcagttgagagcgagcgtctggccttgtaggacattccgatcgcataccatatggtgctcctgcaaagtattgctcgaggaagactttgccagcttcaatctcggatgccttgtcaccagatggcaaagcgcggcggagcaacttgcgagcattctgactccgcatgtaattcttatagtcggactgtgcaattgatagaatcagccgtgcgatataccgtataggttgggcggatgactgacagatgtttcggtcagcatcgcttcgagcagggacttcagcccatgttcgacgacgccgtctccattatgcaagtatgccagtaagtcatcccgaacgcatcctttgtgaccgaactcctccagatacctttgcaggatcactgccatccccgtctcttccggtaattggttgtctatattcaacacaagcgtgtctagtcgcttgttgatagcgagtagggccattagaggagcgcgttccttcttgacgaacgctggctgtaaagccaagtccaatagggtccggcgcgtttccgagaggtaggttgctggtgattttgtggaactcttgatgagctccggcttggaaagcaagaggaacagcacagagagatgggttatatatgccttgtagttcgtctctctggagacgccagacaatcagtcagtcgtcgagagtgggaatcaagaggtacgacttacggcagatcggcagcaccgcgtatctgatcgtcgcctcgttcccactccttttcccaatcccagtcttgtccccaagagacctcgtcctcggtagatgcaggagcctgagcgtcatcctcgtcggcatctggaacatcttgctcatctacatccgaaatgtcctcggactgaccaggacgcttgacttcagcgccagcgatgagccgttcagcgatttccccgaccatctcccatcgctcccatttgatccggaggtcgccagcgacagccgtccaccatccggcttcaaactcgacgtctttctctgctttacgcaggtcaggcgtgagagcttccaaggcttccttttcaagggatgagccattcttgatgccgggtccctcagtgatggtcggcagatctctgtgcgcctgaccagcagctctacagatccgtacccatagtatgaagacgtccggtgtgcggtacgggttagccggggaggatgtaagaagagtataggccaacgataggagtagaggcttgcttgctacaggagtctcccgatccgtagcctgtgtccggtccagtaattgaatgtcagttgacacggcgttcagaagcgagtcacacacattccctacctggaggtacagcgacattcctgcccagtgagccatcttcgggtcctgactgtgtctcagcaagagcaaggccgtctgattcggacagagtctcgcatcagtcatcaaggcgaacgacgctgtctgatataccgatttacctcctgcataccactccaatctcgcgaccgaagactgcacaagaaagcctgcgctcccttctccaagtccttctggtcgtcggcattccaggcatcgaggtagatcttgcgcaattcttggtctatacaccgccattgcgtcagtatcatgatccggaacttgaaaagtgcttgtaaagcaagacccacgcttgccaagtccccgcagagcgaattgaagaacgttgatcacgccgtcgtcgaatactctaggcgggacgacctctggagcttctttggacgcttcggccggcttgtcatccgtctctgccacatcagcagggtcgctagtctgtactttttggatctttttcaagagggcttgtcttccacctttaccccgagctgctgctttgcccttgctaccgctacccgacatgggcttcttctcctggtcatccttgagcaacgcctcgaaagcctctacagcctgatcctcttcacctaaacgttggtgacacagacacttgagagcttggaaagtcgggttggcaacgatcctgggcgccttttttgtcaatctctgtagctggtccaatgccgaggctggccgaccagcgtcgatatcctctatcaaacccgatcaacctgcgtcagctgctcgttcagagcgggtcgcgcaagcgtgatttaccaaataccggtcgaaattgtcgctgttccatgtggggtatagtcctctattatatgagcgtatcgaatgatactcttgctacgattgtccaccgaataacatagctgaatcgtctacccgcaacaatgccagatcataatcgtcatgcaacatgctgctagactgctgctaggcctacttttgcgaccgcgattcaggtggaaacaagactaaacagtgacctcgatgtgcccatcggggggggggggacaacggctacatggcaaggttaggggtacagagtgcatgttctggtctccaggatgacatcggtcgatctgtctatcacaaaggctacctcaagctgtcactaagatgattccctcttggccttgacgttcgcccgcctggcttgcacaccggctctcaaatcgtctaaagcggtcacagtctgctcccatgacaaacacgcatcggtgatcgagacgccgtacttgagactggtagagagatttcagacgtgaaagtcagtcatttgagcagcaatgagaagattgacatggactgacccggaaggtccctcgggaggaacgctctgtttgccctcgttgatgttggactcgagcatgactccgagaatgttctgagcggtttcttgtccctcgagttgttctcgctgtagatcagaaattgtcagataccactgctatgccgaaagcctcgaaatgactcacgacgctcttggcgacttccatctgcttttggtgctgtttcgaactgttgccgtgcgagcagtcgatctgagtcgaagcgccatgtcagtatgacagaccgaacatgctatgatcaccgggacaaactgaccatgagcttggtagttaccccggccttggccaacttggcgacacacgacgagacatgttcagcagcgtagttgggtcccttggacgatccacgcaggatgacgtgagtgaaggggttaccctatagcggaacggcgtcaggtcagcaagctaccactgtctgccgaaagaacgcgttaacatacctcggtctcaacaatcgcactcaatccttgctttgttacagacaagaaggtgtgaccggtggcggcagccctcatggcatcgacagcgatgtcgatggaaccatcctgcagcaagcgactgtgagcatgtctttgcaagccgtaacatcgagatagctaatgcttacggttccgttcttgaaaccaatcggcatactcaaagcagatgccaactcccggtgtacctgcgactcggtggtcctcgcgccgatagctccccaactcgtcaactcggcagtgaattgcggcgagatagtgtctagattacccgcctggttcagtattcacaaatccgataacgctagccacgaaagaggcaaacgtaccaaggaattcacaagcagtaggcaaacccatctcggccagatccaacagcaactgtcgtccgatcctcaaccccttgttgatctggaaagtcccgttcatgtcggggtcattgatgagtcctttccatccgacggtcgtcctaggcctggcagcggtgtcaagcgttgacatcagctccatcatctccggctctgtcgaaggtgcgatctggctcacttctcaaagtagactcgcatcaggatgagcaggtcctcctgggccgcgtcgatgtactccttcaactttttggcgtagacgagcgcagcctccgggtcgtgaatggagcagggtctagccacagagaaggttgtagtcagcatcctgaatagctctgcgaatataccagtggctagacttacccgacaacgaccaagagtcggtcatcgtctcccctcgtcactcgctccacgtattgtcgtccgtcaaggacagtctgagctcctcgtagcgacaagggcatcctacggtgcatgcagcgttagccaacaccgtacgaggagttgatacggccactcccaccgactcactcctccatcagaatctgcggactatacggcgacgaaaagaggagaccgatcagtatccacccgaaggacgacgaagatgtctatcctcacggaataagaggcctgacggccttgactcttcgatcatccaagagcgaagtagccttgcgatcgtcgtccccagattcggtccgttggtagcaagtcgcaacgcggatgaggcagaagtgtgcgtatggccggtcaatcagtggttgaacgagcacttcgggctggtgcaggcaagctcacctgttgtacggtgacggtaggaagggtcatttttaggtgcggtttttttgggtgtggtatatggttatgcgtctaatggactgatgttgttcgccgtgtgagaccttgaattacgatggtctgataagaggccagtgttctcaatacaaggatatcagctccccttgactgtcgatggtgagatccgaaatctcgaccatttcgttcgctcgcgctccaactagggcctagcaacgaagcgagtcacgttcaaccgccggagcggaagcaatttagaaaagcaaagctcggaatttcggctggaagcaattaccttcgggcgagctaagcgaaaggatgcattctaccgtctaccgtctgtagcgttcacaggcgaacacatgtgaaatcaacgataagtcgactgcatcatcaagactcggtcatgttcgacacccaaatacgactcgactggccgcgactggcgacaaggtgtaccacagaagtaccttatcaactctttgcggggactatcggctatcacagcgtcatccttcctcaataatctcccttcaccctacaagacatgcaagacaagggttttggacccgacggtgcgatgtgtgcgaccttgtgcaagcttacaagcttgatgcaggtgatttcggtgtgtggttttactttggatccccaggatgtttgtgattctacttagacctcgcgcgcatcgctgcagcggggtttccatcatgatctcgccctgctatctcatgtactagatcgaccggaaatgtcccgaccaccgaccggcggcaacctagtagcatgttattggacgttgcgtcagtctctgtcaaataacctcttccgagccaagcagaaatcctctcttaaataagagtacgctcatcatttctggtccaggagagtctacgagcttcttgtcaacctcaatatgagaagtgaacagagtgacacgctttgcatatcgaagcttgcacaaactgttaaatttgaagagtctcgagggctccttatgaacgatgattattcgacaggacctctgattccgtattcgcttgtcacaaagtccagaagcctctgtcgggaagagaaacgtttgaagggcatctaagcggcctctcaccacatctcggttgatcctacaggatggaacgtctgcaatccggtcgcttatttcctggctgtcatccccgggcggggtaggtagacttcctgcattcctgttcgatacgaaccggcttccatcgtgagaacctggtatgagttacgctcttctcctgaaacgttcatgccgagcaagccatctggaagaagctggacccgaatgccggcatcggaagcgcgatcgacgaggagaaaaataaacccagaacggttcccgggaaggggggggggagccattgcgtcatcgcctgaacatgttgtttttttcacgttcacgttgccgaagatcaggtcgttcggacatcatcgcaatggccatcgcaaggtaaagtactggtcaataccatagatgagagcgaggggggtgagatcttcgtccgaaacgagtgagaggccggggggcgaggtggacatgacccgaaatgcttgctgcccatgaaaagcgcaggagacaggctccgactccggtcatgcctcttcggcgcggaggagtggggcgggcgaacaacaaaccccaggtcacacgcaggtgaacgcggtctatgctgcccatcgattgaatttacgacgatcttacccccgctcgctgtgtagctgtagctagcctagtcttttgcttgtgattccgagagtgatcgttgtcactcggtctgtagtgaaaatcgcacgcttcgtagtcggggtcggggcgtttttttttttttcccgtgtatctggcttcccttttcgcttgcttgctcgcccccgtttctccgtcatctctctcgcgcgcggccaccgctcagctctagctctagctgctctgacggacggacggacggagattcaagctgtaacctcacctcacctccttctccctctcctttctttcctccactccccctttcgacttcgtcatatcatcgaaatattcgaacagtagtagtctcatcatatcatctacaccacagtgatttggacctcctcctcgttcatatatactctcgatcgatcctcgacccccttctacctctcttggctcgccttcccacctgtcataagcggcatctcttcaactcggacgacaaccgaactgacacgaatacaggcggtctctttcgatacctcatatacgactgcatcgaacaagcatctcctagtcctacctagatcatcctcagtcttaaactctcaacatggtacgtggtccctgcttgcacgcacgagtgtcgctggaagtacaagatgactccagacgacactgtcaacacgcaatacaacaaaaggaggctgacctcgcatcgtatcatctttcactctctctttgcttcgtcccgaaccgtcttttcctctctgtcattgcggcttgctctctgcaaatctagggtcaaacactttccgagccaggtgcgttacgcagaccgtgcattccgcccgatcgacacgctcatagaatcttgtttttttcccccgacaccccacctttatcatccacatcctgctgtacacccttcaccacacctcttcatcgcaccatcgaaacgctgtacacttccaattaaaacctctctcacacctgccacaaccctacaaccgaacgatcatctgaacccgcccggttggtgcaaactgcttagtaaccgagaagcacacctcgatctcgatccggggcaagaagtatgcggtagccgtcagtgacatgcaaggatggagaatcagtacgtatcctgcattggtatcgatcgcgccgttccaaggagagttactggtcgaaaaggcgggaagaggagcgaaaaatggctgggctacccgacgggtcagacgagacgatcgggtgtgctgagtgatacggatgtgggcgtcaccctgtactggaaccgctagacgagaccgagagacgggtcgaggaaatcgacgaggaggggagaaggaacgtccgtccggattcgggagggatgtggggatacgcgatcgtacgggcgcgtatgctgcgacgtggaggcggtcgagggaactcttgcactggacagagcttggcgtcattgtcccgttcaaatttatccgggacttctttgcggaatgacgagatacgaccatatagcatctttgctgatcggatgaattcgtttctcattgcacaggcatggaagacgcccactcgctccacctgtctcttccccctggcgccgccaacggagccaagaacaacaccgctcccgaacagcctgccggtagctcgatgaccaacattgagggtgacgacgcgcccgccttctttggtgtctttgatggacacggaggttcggccgtcgccaagttcactgggaccaccattcacgaacgattggcgtcgctcgactcgtatagtcagtcatccccgctcgctctgttcgctagtcagcgatcctgacgcggtccatccggtaccacagagaacggcgaatatgaaaaggctttgaagaccctttacctgaagacggatgaggatctccgagccggtaagtaggcgaagatcgagtttcatcgcaaggaggccgctgacattggatggctctgcttcactagaccccggcttcttccaggacccctccggctgtaccgccgtctcggcgttgcttactctcgatggacgaatcattgtcgtaagcagcgacgtctcgatcgacctgcctttttgcggggggggggggactgattcatggtaaatcgctcaggccaactctggtgactcgcgatcagtcctgagctacgagggattcggcaagcccatgtcgcacgaccacaagcccacgaatgccccagagagcgagcgtatcactgccgctggcggtttcgtcgagtttggccgggtcaacggtgagtcgtgcgtgcgtacgagacatcaaggcgattctgattcgcagtgttatcaggaaatctcgccctgtcccgagctcttggagatttcgagttcaagcagaactatggcctcgagcctgagaagcagatcgtcacggccgatcccgacattgaagttcacaaggtggacggcgaagaggaattcctcgtcttggcttgtgatggtaagctaggcttcaatccctccaccatgcctccagtgctcatgttcccctcgacgaacaggtatctgggactgtctctcttcccaacaagtcgtagactttatccgtcgtgccgtcgccaacggagacgcactgaccaaggtctgcgaggatcttatggtgaaatgtctcgcccccgattcggagctcggtggcatcggttgtgacaacatgacggtggtcatcgttgccctcctcaacggcaggacattagaggaatggcaggagtgggtcaagaagcgtgtagacgacaaaggtgagtgtgccacgatgatcggtcacaatgatcggtcgtttagatggaggcagagctgatcccatgcggtctcgactttcagtcggatacgacacgccagagcgagtcgccgacgtctttggtcactctaatgctattccccttcccggcgtcggaggtggaatccgacaaggagctatgggcggcttggctacgcttcaacaggcattgggtgctcggggcattcagttgcagagcacggacgaagaagaaggcagcgatgaaaccaatggtcaaagtcaggacagctcgctttcgcgacaagaggtgcgagcgactgctatcgacagactgtatcgggagcgaggctaaatctggatgatttcatcaggccgttgcccagtttgtgcgagcatttaccacgggagcccgcggccccacccaaacttcttccccagacagactcgtaagctttgagccagatcctggatgaaagtggcgcatactcatcccattgttcgctcaggactcggatcaggataccgacatggatgacgccgaggaggtctcggctaaggacgagacccctcccccttctgcttcggccgaggacaagaccaagcaatcgcaacctcaggagcaactcaaatctcaaccgcaaggtgacgaagcgagcggcgccgtcaaggttgagggtttgatggatacctcagagtctcaattcaaagcatagaaccatttctcctcttcgttagaaccaccttttgcgatttcgtgccatcactgcaaagatctacaatcgttcaaatctcgtcatcaaggttgacgtgatagtcaagcatgtgtaataatttctgcctgtgttgcggcatagtgtcggtcttcatgatgtctctacaattgtataatagccccggcatcgagcgtttcggcccattcgttattcgcttggcgatccagcgatcccggctctatcgctcgttgttctcccttgcgaggctcagacgaatctatccgccccagtgtttgccttgttttccagattggcgattcgatcgcgtatgcttggagaggacggtcgagcggaagttggcgagctgatttctgcagcgattttactcgggactggtcgtggcccccgcgtggcgactgatcgggccattcgcttcagcgatcaagcagccgtcacgaacactgcacctgaacttacgtcgtggacctctgactttgctcgtctcgctagaacccgtacgtcgaaggttgctatcgccctcctggacaggttgatccaggtccttactgacggggcgtttcctcgacaagcgggcaccgcttccggcaaaagcgctgcgatctccgtcgagggacagaacgacatccgaagcatccgcagaagcgtccttgtcgtttgcaagcgtcgtcgcttccgtgttttcctgaccagatgtggcttgtaccttcgccaaagcgggagtggactgatcggttggactcacatcgctgggcgttgcctccgggttgacgacatggcttcggactgccgtagcctctggcacgactgccagcggactggcaagcgacacggactgcacgtcgttgtcttcgaacgctgtctgtcgggacgcttgttgtgatacaattgcccgaggggtctggatgtcctcttcatgactgtctgtactggaagcctcctgtccgtgaatagacgggacagacgatctggacggggtacggggaacctgaccacgcagcagatctcggccatcctcgccagaaacgctcaacttggaccttgatatgcgctgatcgaccggtcgcgtggctttgcgttggggcatagggcgctctaacgttttgcgtgctcgctcgacgtgcaatggtaaaagagcgtctttcttgcgcaggagatcgctgaacagccgagacggagtgtggtcttgcagcgtatgcacggtttcgacctgtggtcgcaaaaagtctgatggagacgatagagccatacatcagccaggacgcctggtcattgctgcgagccttagccaactcacgtctaccgaccgaaagagaaagtttcgtaatgtaggcctcgtcggattcctgcgtttttgtgtttttgatcaaggcttggaagtgcgcaaggacggcgtcaagtaccaggatctgaggaccagagagtttggctaacatctccatcagcgccggcggcgcttcttcggcaagttcgacgcggtcatccccctttttgtagagagtccgcgtcgattcgtaacaatcgtaacctaagacgggagggttgagctccaatagccatagcttcactatgaacagagaactgggatcagaagtgtttgcgatttaccgatcggcgatctagcttacctgtagcggcgatcacaggaggattgaactttttgacctccttgaccatctcttgagtcggtacatgagggtcattgatcaattccctaagaggatggatctcgctcaacgaaaccaggtacaaccaggatttgcgacgcactgcaagaaagcggaacaatcagacgatactgaatattgttcgaaaagtgaagggccgcactgaccatcgtcggacacatcgttgtacttctcctcgagcccttgcaagagcgccgtcaagacgtgcggcaccatttccctcggtgaactctcagtcgcctccttgcgcatgatcgccttccacccttgttgaccgccccatttccgcagatcaataccaaaggtgacgtcgtaatcgtctgaatccagactgtcatagatatgcgctttgggacgctgcgaggggaagagacatcagaagcgggatcgtagactcaatcatgcgggaagctttacgaagttgccagttcgattgccctcaatcagagcgagcaagctagaatgaatagatttgaatcagcgtcgcacaaacaggccgactgagttccgtatcgctctcactctgcttcgggtttgtaagcttcaacagcgacgttgacgccagacgaaatttcatgcagccttttgggtatctgcgagatcaccatctcgtattgagaaaggactgcgcagaagatccaagccgtgaattgatgccccaagccccgtaattgctgttcatcttacctgttttgactgccttgagcctctcccgctcccatccttcccactgtcccatacccgactccaatctggcttcgataccaagacgcatgtcttccagctctactagggcctccctgtattcttcgtccgccgccttggcctctcgtcgcgctttcacgtggccagcttcaccgttcatcgaggcgttcttgagggcctggggtagatagttctgaatcatagaactcgctgcagcgagggtgggtacggacgggcttgcgcccttgctcggagatgggggtgcagcgtcattgttggtagggccgttgccgccccggacgctcgccgtcaatgcgtggatgtgattgcgaagcgcctcgatggcaaacggagaatcctctgtcgcctgatcgccgatttcatgcaacggtgcgctcagtccacagaatgctatgaatgaatccgagacgatcgacactcacggaatctttaagcacataaaaggtatcgtcactgccttcccagcccctgccgacaccgattcggccgatcagaccccatcgcaggagctcggaacccgcctcttcggctcggtccgtttgaccggcgaaaccctcgagctacgtcaatcacatcggtcggcattgtgacaatcgccgaacgtcaagccaatgcctgctcaccttgttcagcaaccaggtcacgagttcggctccggaaaaggattcgtcgaaagtcccgaaaagcgtcgtcctcgtcctgcttcgcaaatcctcctcgccctctttcgcttctccctctttggctacaggagtgggcggcagagtcaggctcaagtgtcgagcgtaatctgtcaggatcgcgacgagacctggcagaggcaggctcaatccggcgagtagcaaaggcgcggacggatccgtcgaggtgagaccggaagtgacgatcccgtgcatcgacttgggtctggcaggaggatcgttgtgcatgggcagtgatggcaagagtttccctccggtccccgtcatcggctcgtttcgtgattcggattcttccttgatcatcatggattccatggcggcagccgacctgcttacgctggccaaccttagcttttcgctgatcctttccgccacggtgcccgtccttttcaatcctgagccaggcgagactgaagaggggaactgagagggacgagagctagcgagggcttgtagtcggggtgaagccggacgcggctctggcgtgaaggtgtccttctttggagaagcgatagtcgtgtgaaacctcgccctaacaggtgttcaactagcgatcagaaaccgataccgagtgctcacgataggcagactcactcttcctcgagatcgtccgcgtgatttgccttgaccaagtatgtctgccgaagctgtaaagcccagttcgacctgcatcagctagctctcttccaggcacgacctcgacccacggggactgaccttggctacctctagaaccaacttgccataatcacctaccaagctaccttctcccttgttcttcccactgcccttctcctcgaatggcctgggcacgtacccgaggacgtcttgactggccatcctggtcctcatctcgtggacgttggcccatctgatgaacccttccagcaccctccgctcgagctcatcagcgatagcggcatgctgagatgcttgtcgttgcgaaagagtctgaaggtggttgaaggattgagccagggaggcggaaagacccgtcgataaggaggacgaaaaagtcgggtatgatcgcgaggtcgacaacgactcggcgagcgagtgatgagcggtagcttgtgcctgtatgtgtgtggaagacagtgcgctcggatggtgagcagcaataccgacatggacatttctttcttgcttactttgatgaacgcgatgatctcttgattctcaaggcatccctagatcataccacatgatctcctgatcagcttcgctcaaagaagcaccgacaaagcccatttgatcttacctgctctagcttcccgaacagaacttccataccggtccggaaatcgtcctgggaccagaaactattctggaaagatggaggaaggagaattggggccggcatcccgaatccttgccttgaaaggtggttagaagagctctttgtcgacgtttgatgtgatggctgatctcgcaggagctatgtggttgtcgctgagggctaggcgagcggtttggtagacacggtatatctcgcaacagctaaaggatcgatgcttagcctagtaatcgtctgttaccagagattttggtgtccagtaatcaagagtgacgggttggagtgtgttcccaacctatacatgaccctatctattcgtagaattcgtaggaaggtcccatgtttgtagcttcggtcgtcatcagagagagttgtcaacagcaacacacacagcacgcgagcgagcgacggatcaacggatccaaaaaaaggaagtaagtggacaagaggccgaggttcggcaggtcatgcatgcatgtatcgatctttcaatctccagtcactacaatcgcgacaccctgcatctactactgttgcatcccgttcctttcctcctcttctctcacggcagcatgagcccgttcgatggcgtccaacgtataggcgtacgtctcggcaccatacgtcaggtaattcgtctcttcctcaacgccgacggccatgtctcccatccccgtcggcatgtccagcatctgcatgactccttcgtgcgtatgcatcgtgccgaccgaaatctcgtgatcagattcctgagggtgatggtggacgtggtcatgatgatgatcgtgcataagatcatgcacaacctgatgatctccctcgtcatgctgatgacggttttgatgatcctcactatggccatgcgagaggtgcgcatggccgaactcgcccggatccgagggaaagtctagacccatagcagccatgtcgaggcccatccccgtcgacatgtccaagtggtccatttcgacgtgctcgtgcaaggccgtttgcatcccatcctcgtgtaacccttgcatctcgctcgaatccagcatgtgttcttgctcttgctgttgttgttgcagttgctgctcctccatcatgctcatcctgaccccgtcctccgtcacacccgcgccagccaacagctcccccatagcatccctcatctttctcggcctgcccacccgtcgcttcggactgatgtacgacggatcttccctgcgtctcctctccgcctcttcgatcctctgcgatcgatacaattcccgacgttccttttgacgtatccggcgattctctttggtctgccaggccgggacgtgcgtcttgttcagagaacccttgggtcgccctcgactccgtttagagggcccagcggacgagcttggcgaatcgggtgcggcttgatagtccaaaactacggcttcgagcacgtccaagccgatcggtagaccagagtctgcttcgagcaagggcgagtgcaaaggaaacgttcccgctcgttcgagatcagggaccgagttctcccgggcctcgacgatctccaagtctacctcctggggggtctctacctggacgatccttttaactcgtgctcgtttactatactttttcttggcgatcaggtcgacgagcttgacgtggtggctgtttaggggggaaaccagcgactcgaacaaggtgtcgggttcgtcttctggtgggagcgcggggaccaatgacatgagggtagcaaggtcgtgaagaaacggacctgagaaaagctgcgacgtcagcgtgcagcttgagagattcatgtggaccaaccagaactgactgattctgggggaccctcttttcgccttcttgtccgtctttggtccgaacactgctcgcaactgatccgcctcttcctcgaggacggccatgatagtggactttgccagactagctcgttggtatttgcttttgaagtctgtatgctcttccatctggatgtcatcgagagatacttgagttgaatcgataaacgaatgaatacaccaacggaatacttacaaagtccgccaagatatcctctacgcctcccggacgctcgtccggcacacatgtcaggctagattcctcttgtgatgtcaaatcgtgacttgaatcgtgaaacccttcatcttgagctcttgccatcgactcgcttagctggaccaaggccgggtctatcccggacaagtccggctccagctgattaaagtctccatcctccgtcagcaacgtcgggtcgatgcgcatcatctggggtcagagagattctattgcagggacatcgagtccttgctcgctgcgaaactcattcgatcagaaatggagaaagaccgactgatcgactgaacagttatgtccaacggtctacgacccgactctaagctagagttgcagaggcggggattgtcgacggatcatgcaaactgtaaatgtcaggctcagtccttcatcccaaacgtcatacctcgacctgtagctgcaggacctggcgacctcttgacatcatgtcgttgactgacacggcttttaatcgtagcagtcaccgcattgcagctcttggaatttatcacctcacaacctgggactatagacagtcatcagtctagcctacgatgaacgaaccagtgttgttcaaggcgttcgatggcttggtaggggacgaaagccaggtcgaccgcctgccctactccaaagaccggctcgaactcgttcgaagagctcgggccgaattacaagactcacagaaggccggccaggtaaatcgagatctgaactcggttaacgtgtcgttagtaaagtctaacgatgttgtccgttaccttaggatggcttgcacacgatcatcaaggacaactttcctgcggtctcgcagcaataccagtctgccgaaagcatacaggccaagctgaaagagacacaaggttcactagaggatctagaaacttctatgaagggcactgtgagtcgtccgtgttaaaggatttacgataccttatctgacgattgtacttcatgacatcaggacgccttgacccagcctctactggcgctcttgcaatctcgagcgcaacacgtcatctcgcaaaagtcatcctcggctcacctacaagctctacaagaactccaaggtcacgtacaaaaactccaggagcttgagaacgacatccgcgcgggccatggggatctgcgttgcaaggagcaggtgttctggactggcaaccacaagggcaagggaagagaggggatcaacttggaagtgcggagcgaggttctcaagcatgctcgggctaccggtcaactccaggtcagtgctcccttgccgagagtctgttatatccgcaagaacggagggaagactaatcttttcgcaaagcaggaccgagcgcggtatctcaggtctctatacgtcgcccagatcgaggacggctacgagcgagcgatacatttcgagccgaacgacgctggatccgtctgtgagatcaatgctagcgtgcgactaaagtctcagtcgggtaagactgtcacttggaacaaatgccggcatcgaactgacactcaccgtctttatagcaaatggcaagaaactgccgacacaggctccgacgacttcgttcgacttcatcttgcgcacactgcaagagtatcaaaagctcgaacctctcctccaggcaactcgatcgcacttcgcgcaagggatcctcaagccgctgatccgacatagggcaaacgccaaggaacaggctcggctggtgatacacgaacaaggggatgcccggaagatcgccgtcgagatcaggccaacagaactgaaggactcggggaaagatgccgaattgtacgccgacctggagatcctgttcgagtcgctcagccgggcttttgcgataacgggtgcggaaggcaagaaatacgacgtactcgatgcgcagatggaggatcttcgatattccttagctcgcgaatccatacaaatactgctcgaagaccggctgaaagctggctcgcctgccaaccgatacctcttgcaaggttgggcgaaccgactgaccaaggcggtcgagttcgagacaaagcttagcggagcattccagggccaaccattcacgttaatcagccgcttcttcgccgaagaggcgggtcaattctgggctcgcaggcagaaagagactatcctagaacgtgcccgggggatcatagccggaggatgggatggttgggagagcgtcgaggtcaagaaggagcaacggatcggagcgacgccgatggaaacaccaagagcgctcgatgatcagactgtacgggatctaggtgcttcagcaccggcaagtaattcggcggaagaagaggccggctggggattcgacgactggtccgtcgaagaagaggccaaggcagccgatgcagacacggcaggcgtgaacccaagtgaaggcgtcgcggaagccgaaacaggctggggctttgacgaggacgacctcagcctgtcaaaggcatctccgcccaagcccgttattgttcccgccaagccaatcagacaagcgaggaaattgggcaaaaagcaaaagcaacatcaagcggaccaagaggctgaagagtcgatgtctgcttcggtgtattcagacgcagggtcgacagctccatcggaaacggccgagaccgcgaccgagggatggaacgaatcagtagcatgggaagagccttcgacacagtcgatcgacggcgcagcggcgcctcaaccagaatctcagataatagtcgagcgatatcaagtgtcgaaagcatgcgactcgttactggaggtcatcttgaatgtgatagagatcgcgcaaggactcgagacggtcaagtgagtatcgagaactggaccttgcgacacccgtgatgagctacctaatacaaaagtcttcatagtcttcctggtggatctttccataaccttgccgagactatacaatcggtcgccgccgagattctggatctgtacggcgatctcatgccgaaggcgcacgcggcgcagatcgaccatgttccagcactcgcgatgcaattttccaacgactgcagccaaatagccgacgttgtcgaatccatggcacaaacctcgaactgggacccaaccgactctgtagccagattgcgcgagttgagtgagatcgcatacgagaagcaaatggttagtccactcgctgcaaaggaaggtcaacgtctgacccttttgactgatcgagtctgcgttctggccacagaccattcaacgacaggggattctggaagacgtcgcgatggctgaaggtttcgagggttcgactttcgaccgaacctttgatcgtcagaaacaagtcatgtcgcagatccgtcaccagctggagatgctgcatcgggtctggatggtgagacacatgcggcgatccaaactatttcaggatatggctgatttagcattgaatttgacagactgtactcacggaagcgagatgcctaagcagcatcgggcagctcgtcgagacagctatcgctcgggtggccgacgatatcattgccattccggacatcaccgccgacgagtctgagcgattaaagcagatttgcgaagttttgaagcatgtcgaggacatcttctcaagccatgttagtagtcatgtcgtgcacgtcgaaactgccttactcaactagcttggttcctatcgcacagaatgtcaacatcgttgcgtacgtgccacactggctcaggttttgctatgtagccgaaatcatggtacgtctcccaactcggcaaaccgacgtgactttcgggcattgacgctagggctcttcgttcggtgtaggatgccagcttggccgacatcacctatctcttcgaatcgggcgccttggtagacttcacatcaagcgaattgatccacttgattctggctctattcagcgatacaccactcagacgcgataccattgccaagattcatatgtcttgatggacttcgaagtccagctcctaacgactttcacgacgatagcatcgactcaagggccgaatggctggatgaaccgcctgctgctcatggtgttgtatgcaagaatgtaggtatgcgataatagataattctgagctacacaagacggatggaacgagattccctgacaacaacaatgggttctgccaccatcattgttggaaccaaatgtgtgccttgcttggaacaactccaattttgggtcgatattgccaattgcgaggagatgcggggccggagccggactcacaagatcttgcaacatcaacatcaggctttaatgttgcctctgttgaaaggccatgagagcaagagcatctctggtgtttgtgatggccaaaggaggggtgatttgggagtccggaaattccttgcgattcacttccatacacaaccagggctcaatcccttcccccgttccaaaagaagaggtctcagaggaagagacggtcatcgtgacgttcactcaagaggaaaaagaggcggtccctacgttttcctccgccgacgtcgctgatgccatctcggtcctacccggggtactccttgacgacaggactgtagctgcggtcgttgctaagatcgctctcgctgttacggcccagaggtgagtttcatttatgacctttatcacatcagtcacaaagctaacatctcaaatgatcatcatatcaaggagctgttcgtgtttctctgtgaccgctgccacagcaacgagcacagcgatggtgacaacgtatgcaaagacacccaaggcgtatacagatcaaacggcattttcctcgcgcggacgtgaaggcattcgagatctcagctgatatagggggatcgcctgagggcatgcgctcatccagtggcgaccaggacatagttccataccgtctgatataagcgcgttgaagagcgaggaagctatccagacattgcgattcgcggcgcagtctagcacagaaacttcggcgatggggccaaattgttggttgtgaagtgcgaaggcgtccgtgagtgcgacaaggcagtcaaaggtagccgttctcaagatcagccatttcgattcttccagaagatctggtatagtggctttgtcaagaattgcgccatgtattgacggatttcccttaggtcgatgcgacgaaccccatcgacgtctcctcgagcgcccacgacttggcagggtgcggttccgcgatatcacgcctctcggttggcgatgccgggaggtggcgatgttgcaaagtaagatcgcaatgcgcgatctcaaccgtgaacatgtggatagctcgtacgtctcctgattttcaagatcctctcgctcggccgagttgcgtcgctcgaccgcgctcttttgtaagcgttgttgtgatcgcacgagggatacaactgtcttctcgcgtccggtaacgattttgttgcacggaggcttgaccgctctgagggagattcggacttgatgcgaatcggattccgaaccttgacaggcgacaagtcgacgatgtccgtgcccgagagatgatttgcgcgcacaagattggtaagacttgcctccaggactccttgaccttcagacctgagattggcggtgccaccgttaaactgcccgagggcttttaaggactcggccagatactctggtcccgatagtgctactccagaaacaaccggtcaatatcatgagcattttgagtggcttagtggcgatttgtgcgcaccttccgtccaacatcgatccagatggaccttctgtacgcgtggccatctcagagcatggtactgaagaacattggaggggaagaggtcagcgctctccttagagatgaccggtgcttgaattcaccttggatccaggtagcttttgaaatcccgcgcccatcaattcaacattcagaggctcgttgaagactacgcttggcaggaggcagtctcctctcagagtcaactggtacgacatgcccgggataccctgagcatctcagatgttcagcaacgatgatgaaccaggcgtttcgcgtgcatacttaccttctcatcccgtttccaaattctcgagggtattttgcctaactctacatttcggttgatacgctcgagctgatccctggttaaaccgtacgagacagtaaaaagcacttcgaaatgggcaacttgctgaaatttcaggtgagcccagtggcgggatttctagtagtcctgcctgcactcgcaccttgcgtgccagcacctcttgcggattggtcaggactgctgcgtacaaggtggtcatcaccgatgtaccgactatcgcagatcagaaatctgagtgctcagtcaatgtgccgcaagtaaattcacgtcttgacctgacccaccccggagttctctagcacgatcacggtcccatcccatccctatgacggccaggtcaagacagtcgcccataccaggtatatagtcgcgctgcggcatccttctttcagtgacaatcgcgtttttgaaccggatccttggacagaccttgagcttaacccatcttaagcgcatatcgttgtattgggactctgcagccttcagcacaagaccctctaccaactagattcagctaattgaggagtagctcgactgctttgcagactgaccttcgatacgggctttcgacgctgcgaaaatggacgccaaccgctgttctgcgaattcgagtcccctcgatatatcgatcggatatcgctctgcgatctggcactgtgcgaacaggattgtaagaaagctaacaatgacagcgcgcttaacgcaatgatagtaatgggaaacttacatatccaggtatcacctgtaggtattgctccaggtaacgacggcgcgtattgtaagatctcctcaataacgacagcccgttcaggtacaaaatatcaaagaaggcaagataatagtgtcgatgagatcttttactagcggcatcatgatccgtgtcagtccttgaataatatagtcgcagcatgtccctgtgcgtactcgtctgatcggatcctgctcagatgccaaaattcctcgatacccggtcctcgaccattacctcgacaatgttcattgtagggcagaagctctgcctccattatgatggaatggatgggtattggtttatttgttgttggcgtcagtctttttgttgttggcgtcagtctttcggctaacgctgcgtgctgcggtagctctgtttcaagctcgtgacctagagaggcaagaatgatactgcgcaggggtgctcactgagcctacagagtagccctcctacacccctcgaaggactcacgtatgacaagcccgcctgtccagggtactgtctcgtttagatttcgaaaacaatcgaacttgtcgctgacctccccgatcgatccacacgtggatttgtactctgtcagagccaagtcagaccatatgactcttgctcgactataatggcgcggcgcacctgatcccatcgtatttcgtctctgcccagatcgtcttcgtgcgctcaccggatggcccggcgatcatcttcaaggccgagcggatcgaacggcctttttcgcatttaggtatctgccaaatatgaacgcgttattgagccgtgctatcataagcgaactcgagctgagacatcttacctcaatgttaatacctggccgaactagctcgtccaggtctgttgttacaccacgatccggccgtcgtctttttccggctccaccacccctcctttcgatctcgtccaatacgacgtccaggttgctccatactctgtacaagggccgagcttcccaatcccagatttcaagggctgcagtaatgtccaattgaggggctgccttgttttccacgagcaaagcggtcgtaaagctcaatgcctcgggtggcaagggggacaagagtggtcgaaggtcggacaagattatctggaccagaacagagcaggcgaaaggcgacaggttggagcggacaaagaggtcgtagaggatgtcggtttgcgaacgcggttccgcgacgtgtcctgggcaagacagcatcgtggagagaagtggtagtcagtattgcaagaaaattaactgccagagccggacacgtacctttgcccaactgcgaaaagggagaatgactagccagctcgtccaggagacgatcaatctcggcaagagacagtgtcgcgaccttgccagtgctctggatgaacagccagctgagcgccaacgagacgtggaatgatatttccggcgactcactctgatttccagaatgtgccgagcgacccgttcgacctcttctccaagacacccgctcgtcccccgcccaccgactccttcattccaaccgtaaagagaccccgcctgtagcacgttcaggcgcatgacatcgcataatcgtctggcgagtaccgtctctttcatctggtacctacgcctgggcatgatatgggggaaaagtagccggaaaagatgggtcccgtaacggggtggaagcgggcagggcagggcgtgaaggaatagagcgaatcgagctcgaggctggatgctcgactctgctcttgtccgtccgagattacgaaccaggcgggcgaagctgaggaaagtgggacaaatgcgttcaggatgtgtgcgtgtgtcatgagaggccgaaccagaaagacctcgcatgcttactgctcaaagctgtccggctgaacctgcatcctggcgatcgttcaagtcctgtccattgaaaccggagaggtggtccagcgcagcctggagtatagccgagctcacagagcgggtatcttgggatctctgatgcgactctaggtcggtttctccagttcggttggatccgattgacaggcaagacggaaatcagttgtaccagcgcacagtatgtccgccaaagtgcaagcaagctcgagaaagctatctttcgattaattacgcgttgacgcgtcacgcgactttcatttacattcccgctcgatgcatcacatccaaaacaaacccccgacctgcaacctgtctgcaacctcgatcgatggtatgggtgacatattgattataaggtgatagccgtcgagaacaagtaggcgacggaagtgcacatggagaaagcaaccatcgaggatcgtacaagaaagagcagccggatcaagccctcctcgacctcgctctcgtctgcaccccctgtccgcttggtaccacctgtaccgcactcgtcttgcccacgctttccttgctcttgatctcttccagttcgatcccggaatcgatctcttccaccggggttcccgccgcgctcgaaagggacgaagccaccgagacctcgtcgtcctcctggaacctcgcgacgacatcgtgggtgacctcgaggacgggtttgatgatgttatcctcgacagtcgtctcggtcgcctcggccagggcttccgccttggcagctgctcgacgggcgtacatcttggcagcctgttccgccgacatgcgtgttccgaggatttcgtcccatttggtactgtttcaaacgacgagcatggtttgtgagtttaccgttcatgccgcagacaatctcgaatgaccagatggcaagcccgactcacaagaagggttgcgagaaattcttcttgatcccccaactctgatggtgtagatcgtggtactcggaattgttcccaaagatggcctggaagggatcccaccagatcttgtacccacagtgatcgtccaccgtcttcatcgtgctgacaccaaagaggacgatgctctgcctgacggtcatccccgcagccgagtgagcgatgacggcgccgagcgaatcgagcaagagaccttcgaaagggtggttgtatagcgctccaaaggcataaggaacatagagtcgatggtgaaccgagtggaagtgtcggtagagaaagggaaccgtgtggaagagtcggtggaggaagtattgccaagtatccatgatgaagctgcagtgacagatgtcgagcatacacgtcatcagaaaggctgcaggggttgatgacatggtatacccaccacgagagactcacaaagcaagacccatctggagcagaggcaccccccaccaatacacccacccggtgatcctttctccacccaacaacctcgccgcactcaaggccgtcctctcccctaagaccaattgcaatccgctccctaggacgccggccaacccttgcatgtccttggtatgatccctccagacctcccgcttcagaatctcttcctcgctctccaaccacacccaaccgagtgccgtctggatgacctgttgtagtacgaccgcctggatgacctgacgcaccgtcgcccggttgcgggagaggacttcttccgactcgtggatcctgtacttttcaaaatagggcatctctgcggtatcgatcgcgtgccagacgagggaaaagacccagtaggcgacgatcggggcgaggagggagaagaccttgtccgtcatgaaggggaggacggaagggccggttgggtggtagaatgggtagtgaggttccgtgggtgtcaaggtgcggaggagggaagagttggcgggtgggaaaagggtggacatgataccggtcgacatggtgcgtgatgctcctcgaacgaatccgttcaaggatgtactcgagtcgatttgtaggcgagtcgcaacggcctagccaagcttgaaatctgcactgtccctatcgacaaggttcgtgctgatccaccgattgacgtggtaccgtcagttgacgaccgacttgaagcgtgtggctgtcgccttttgaggcaaagtcggggtagttgatgtggagtcggtcaatcgctcaaatttccgctgacaaagggagcgaagcagagtgagaaccgagctggctggtgtcgcggcgagtgttttccgggatcctagcaagttgtgaggctatatgtatacagatggtcgttgatggtcgagattcgggggggagggtcgttgttgggacttggttcgtagttgattcttatgcttcgtatgctcttgatctcctgatgcctgatgtgatgatgggtaggttttgattatgagagaggccgagtcgaggcgaagatcgcgcgagcgaggtgaggcgaaaggcagggaaggcacagaggaggggggaggggggggtgacgtcgggcgtcccctctccttcaaaagttgttttctttctgcttcgagccagagccagaggtgatggggcggcagcgaaggagcccgaggcggccgaacgggaaagggaggtagtgcccgccggagatgccgttatcgtggcggccggccgagatcagcaccgctcgtcttcacgtaattgctccttccccccctacgctggtctcgctgttttctcacgcgacttgccgccggagacatcgcaaccctctcctgacatgacgaatggatgatcgatcaacctttgagggttacacaagaggtcctcggcgctcagacgacgggtcgatcctgcacacttcttcacgtacaccttgccaggcctgttgaaactcgacatctccatgcaatcagtcgcaagcaaacatgccacaagataacaagaagaaaaaggtcggtcccagagatgatccgtcaaccagaatgaagcctcaccgacctcttatcttccgacattcaggtgctcctgatgggcaagtctggtaagttcacagaatccttctcgtcttgggcacagtcggccgtctgatcattagggcgtatcgtctcacaggaagtggcaagacgtccatgagatccgtcatcttgcaagtcctacattccctatcctttagcacgtctcttatcgcccgagctcacctcgaccaccgctcgtctcctctttcgacccattcgctcgcacgcttactcgacctggtcggacgcaacggctcgacagttcgaacatgatcgccaaggacacttccaggctgggcgctacgatggacgtcgagcatagtcatgtcgtattcatgggcggtctcaagctggtcagtgacattcccctctcacccccttccttccaagcctctacccgacttccttccagctcacccccatcatcccttttcttgcgctatcagaacctctgggattgcggtggacaggaaaactttctcgctcacttcataagcacccagaaatcggaaatctttaaaaacgttgccgtcctcatctacgtgtttgacgcgacgacgccgacgtcgtattcctccgcctcctcgggcgggacgggggcgaactctgaagttccttcgtcccccacttcggataacatgaaccaggcaggtgggaagccatcggggagtacgggcgggagtgggaatgggaatgggattgctagtggaaacgagacggaatgggaacgagacgtcaagtactttgaagagtgcctcgaagctctctattcgctcgcacaagaggaacagaccgagacggacgcttctgcccccgtcgtaccccccaaagtctgggtcctcgtcaacaagatggacctcgtcggggatggagtggcgagcaagaagatcaaggtgtttgaagagaagagggacgagatcgagaggcgttgcactgtggtcgggaagaggttcgggatggatgtcggcaggggtaaaggagtgaggtgcttcgggacgagtatttgggatgagagtctgtacaaggtgggtctgcgtacgggtcccctgggggttcaggctagtctctgaccgagtgagaattacccggtacggatccacaggcgtggtcgtctgtcatccacaacctcattcccaacgcctccctcatcaactcgcacttgacccacttgcgaaacatctcctcttgcctggaagccgtcctctttgaacgacaaacctttctcgtgctggccaagagcgggtcagggctcgatgctgatccggacctcgaaccgcgcggtagcacggatgtgagcaaggccaaggaggacgaagataagagcaaagccgtcatgatggatgtcgaggggttggacgagatcgagatcgccaatggggccagagggctcgagagaaaacggttcgaaaagatcagcgaggtcgtcaagggtttcaggaggacgtgtcagtgagtctcacatcaggttcgggtacttctgatgttctcggtgatactgataaagggttacggtggtatagacgaaacagtcagccgtttattaacctcgaagcgaggttcgataacgcgtcgatcggcttggacgtcttgacgagcaatacatacctaatgctggtcagctcggagccttgggtcggtgagtctcgacgggatctcgaacggactgcagatcgaaggcttcgtggactgacccaactctgcgcgcgggacctgcctactatggcacagagccgagcttgttgatgttcaacatcgagcaggcgaggcagcactttgaagagctgagcggagagcaggtcaagaatccatgcgtgtgagtgacggatgcttttcgagtcgttcaggagactgggggccttggctaaatctttcatctttgcgttttatcctgaacagcatatgcaaatctcacccggagagcaaatatcaggtggaagattcgacagcggaaacgcaggaagagtgggggcacggttgaaaggccggagcgtcggattccgcgcagcggcatccccgcattctcatttaattgcgatcatactgtatggttcgctatgtacgtcgtcatctatctgtcacagatctagttgtataatatgggcatacctcggcattggcccgtcgccccgccgtcgcaactgctgtcgtctcgtcgaaagtggacgccttcggccgaagctgaaatgtccgcgcgacttcggtggatagacgatgcgagcttggatggacttgcgttcgacccgggacatatattcgtcgacttggacaattagcctctttcgccagactcgtttgtgatgtaagagcaagagctagtaattttgcctgatattactcaaaatgcctagtgagttataaatctcagcttctagcttctaggaatggacctcgctcatcttgttgtcgcacccgtctaaagagatctgccacatcgtcgtcagtctggtttgcgtggcctgaataggcgctcgctaacgcttccctatcactatcgctctcagctctggaagctcaaggaaggcgtgtctgttcagaccgccaaggcctcggtcgacgctctggccaagctcaaggcacccggtcgtctgtctatccagatcgccccaaccgtcggtccgtccgacaggatccagggtttcgagcttgggatgtactcgacctttgaatcgatggatgccctgaacacgtacgctacatcaaaggagcacgtagagtgagtttccttttggcgcaagtatcacttgctacaagtaagggtggctcaacgagtggtatgcctgattcagatgcgtcgacaacaacgtcaaaccctacgtcacttctcccttggcttatgactgggagattcctgaatagagatacgacttttcacaccgcatctgtagaccatgctatcgaatatcgaatctatgcatatccggtgacaagcctgtcttaggacgattggagcattacagagcccaggccgagcgagcctgcacctcggctaattcggtgaccgctgttggtcgcgcagatcgccgagccttgaactttctgaacatatcacgcatatagcgttacaatgatcagtcggcccttgctcgactgacttgatcgagcgacaacaaatcaactgtccatgtgcagtcggcaatgtttaccgcacgtgccatcatcgatcctgttatagcgatcgccgttgccctgctgttcatcgcctggatccgtacggaatacctgtcgcctgtaccgactgaagctgcgacgctcaggtatccccacgaatttggcttccctacttggttttcaaaaggccctagtcctcacgactatgtggaagatgatgcggtagacacaggtggctcggttgaaaacgctctgattcttcatggtaggccctatcgagcagaaaggctgctttgcttgcccgaactctctgagccttttccgatctagaccatgtggatcatgacttggcgacctcggccatggtccactactttgaaggacttaaatccagcaccatgcaagctaccgttcggaccgtacagcagcatgcagagattgcagaggacgggtcatgcccatggtcctggatcttgaccataggaggcagtaagtgcaatctcgctcgacctatggggacggcggcttaatgcacgctatggattagaagcacacggacagactatacccgcaggttgcgagactgtaccagtcatgtgagcaaattcagctcaggcagcacgtgaaccgacctgatccaatagcccttctagccaatacggcacagcggaaacatcagatgcgtcacaactggatctgggaactggagtgagaacccttgtttctatttgggctggaggggtccgtcactgaagctgcaattcccgtatcccaggtcagtctcctggattcgtcaagatttgatcaagtcgccgtgacttcttcgctatactcgcaaagtcacgaggatgtgggcctgatcggtgagacgtcctccgccgaccggctacctgaatggttgctcatctttagggttcctcgtatcgcagcctttatattaccggccgtgagtgtcgccaagccttagcctcaaatcagcttattgatgagttggctaatctccgtactccaggctaagtaagtggtgcaaatatactgctgtagctatcggctgcgttacactgctgagaccttcatctctcagcccggatgtcttctggccagagaacaagccgtacgctacacgacgcaagcaagtcacattcttcacttcgcacgagacatggtctcatagagctcaattagaggatcgcttgccatctggttggcgaagcatgttgagtcagtccgatctgaaacgcttcctgagtttttcgatgatgacgaaccgctatttctctcgaccggttcaatcgcttcgtgttctcagtgcccaccgtggattacgagacacaatcatcggcgacgcttctacgcaaattgaaacacgcagaaaaagcactggccggggagatgcgaaatagcggtgtctgcgtcttcgagggctggtcgatgggagttcttaccgaattgtcagccacttttttccgagtatcacggtccctgactgaactctgtgtgttctcgcaactttcctgcagtcatgcccaagccatgctctcaggctgcgtcgtcgctagcgttgcccctacgatacaagcaggcaagtcaaatctaatccagtcctgacctgctatcactgatctgtttgcatgggagtagacgatctcgccgacctgttcctgaccctgaagcagcaaacccaagatgacagcgaacaagcgatgtacgaggcagtagatcaagctcttcgagagaccacccatgccgagctggatcgcaaggctctttgggcgtttgtctacgctcgggaaaagctgacatttgacaagagactggcggacatcagggtttgggtcaaagggtatcgagaaggccaacgtgggatcatggtgagctcgacagggtttggtaaagaaaggctatgtgctgagtcggtcgaggcttgtcggatagttgcctttcggttacaagcatgtattaccatgaaaagagttttcgctcaatatccattcgattcacggtctcggtcgcattccaaactaccggagcagagatagcttcgcatcggttgtgtgataagatagagaattgctggtatgcttttacaggaccacgatgttgggctgggtgtatcgggaagtgttgtagaccttctttccgacctgttcgacaacgcacgaaacacgaaatgccgggcgatgctgtcagccaatgcttggcgtagccgaaaacacgcttggactcacctcccaatccggaacatccttcatgatctccttctctcgagcgagcgaggcggtgttccttcggtaggcatctcggtcctgctcagcaaggatgagggggacgaggtggattctcgaccaggcggattcccgcttgagctctctgtgacgaggcaagcggatggtagtcaaagtgtgtaatcagcgaccactccaaatgtacagggttcaatccatattagcaaaaggagcgtgcactcaccgcctttccaagttaccctttccgaccatgtagaaaccgtacgcgcagatagccgtgatacctccaaaaatggcagcacctccgggtcctcgaataggcaaacttcgcttgtatcgaatcgactcgaagcctcccgaaggaggcatatccctgcaatccgaccaggatgtcagtcagctgcccatggttgacagtcgggtcggaaagtagatacgaactgcctgggaggttgaaccactgtttcgccagtcgtccatgccggtgagctgagataatcgggttgaaatttcgcacattatctactcactgtttacaaaatgtcagtcagggtgttgatgcaatcagcctcccgataccggcaagctcatgcatgtcatgcatgtgatgtcgttgagatcagctacatgaatatggctcaaagtcgattgggagggagttgtttgataagatcgcagcgactattgctaattacattttcataaatgacgtgtcgtagaaacgaaagcgcctccacttcaagctagccagatctcgggttgagccatcaggggtgaagctatgatcaaaaggcgaattgtaccgcatcgattcgtgtgtaggtccaattagtacgccagtacatagttcatcatcaatctgcgaccgaggtcagaacggggaacctcgattaaactggaattacaagtcatacgcttcttgcgtgaaagacagcacatataaagctattcggccatggccgcaatgtcctttcaggacttgccggagcacatcaccgaagaaatcctcttgcagctttcattgaacgatctcgagtcgtgcaagagggtaagctacattgtgcataatctgcaagtttttgatatgacatccttaacgagcgctcgttgagacaggtcaacaagtatttttacgaactcgtaacgacaaatgtccagctactcttgcatcaagaactcgaggccacggcccaagtgatcccgaaatccgtacgacaatcgaacaccgcggcatccctgttgtctaccatccgggagcgccaatctgggtttcgtacgatcgcgccctcaaagacatacagggtcaaccttgatgaaaacgaaaggaggctttacgagtacctcgaagggacgctggtacggggaagcggctcatttttttccgcgggcggaatgccttcaggagcatcagtctatgattttacgacatcttctgaatgggaaacgatcgaggcgtacacaccgagctattccttatccgagaacaaggaccgcgagactagcgaacgacatcaggatgaagaggaagaggtcgtcgaaatcggagaggactctgatgacaaggaacaatacgttgtgaaacgttggaaggcagggtttgagatgaaggatttcactatcgatcccggtcaggatctctttgtgatcggcgaaatgaagtgagtctcatctcgaactaatatcttgtctgatcatgtcgtcctgaacacgcgctactcgcaatagccgtactcgcgatgccgatcatcggacaaccttgaacaggctggacctacatttcttgacgttatccgatttccagcctcatcctaatgcttgtgctacgggcggaaccaaagggttcctgcgtggcgtcggcgagtgggaatcgggatcggtcagcctgacgttacaggtgagcttgctgagctgtacccgcaacgggacttggtcgcttatcaaatcgatgcaaccgcaggtctgcgatgacaaggtcttcgtcttttcgaacaatctgggacgacaaaacttgccagaggcgaaactgaccgcttggaactggcggacaggacagctccttttcgtatgttgaccatcgcctctaaccgtctgcagaccgaacacgatcgttgaatctcgttaaaatgaacaggagcaaaaggccagcttcaccatcgatggtcaaaacgtttccttgttgacgatcgaggactttgtcttactgagtccaacgacttacgggttgatccaatatgatatcgagcgtctgcccgtaatgcctgggacggcattcccttgcttaatgaacatttttacgttggtggaaaacgatgcaccgaaagagggcgacgcggactcgggagacagtcagaggagggccacgtatgtgccgaaaaagatcgcggttttcgacttaccgcgatggctcgctgtagtcatggtccgtgagtctagcccggatcgtccactgacacaggtgtactttctaatgacgctcaaatctatagacatgcgatcggacccgcctccccgacaattcttcccaaaggagaatccaatgaagatatatccgaatccagaaacaggcatcatcgttattcaatacgactgtgacgacggacctatgcacgacaatgacgtcgggcctgtctatcacttgttcattcggaaagaaacccttctctctttcttgccgataaaaggctcaggcgtacataccgccaaggagcttgagaacgtggagctcaggcgtatcacctgggaggagctgagcccatacactcgattcgtggaagacgtcgaccggcaagactgggtctgttacgtctaccattaccgattcgtgtcaccgcgaacagagcatcgattgagtccggtacacactcacgagatcgaagagacgtacatccgactgttcaactttgatcccgtcgagaccgagcgattattacgagcgagacgtagggatcttgccgatggcaaaagggactggaaggattgggatggtgccgacttggccgaagattctccggccgaacgaccgagtcacggtccggaccacgtctaccaaggcatggacgagcggaacgtataccttatgaccgacgaaacggtagtcatggcagaggggtggctcgctcaagatgttcatactggaagcaaggttagttggctcaatgcgtggggcaggctgtccattccatctaagcaactccttttgcagatgccttatatttggctcgaaaccaccaaccctaagcgatgccacgggctcatgattgacgactcacgaataatagcgatgacggtgagaggcggctcgtcaatatggcgctgctgagttcgcgactgacgagcactttgatcggatagcaaaaggacgatgacgacgaggatacccgctcgagcggatctcacttggaggtgttgcatatggggccataaacgttgagctgccaggacaaccgctgtatactacttcaagcgtgatcatcttgtacatattatcgcatcaccagcaaatcatgaaacgtaaaatctataaaacccggtataagatcgtccatcctccgccccgattctggtactggcgtccacccagtcggtccgatagaccgactatctacgcgttgatcaagtagactcgtccctcatacgcttcgagcgtctccagagagctgtttttgtagttgctgatagcgagcttggcctctcccttgagatcggacggcagcttgaaagctacctgttctttggtaaagttgagggcgatgacagcttggctgttgtcatgctccttggtgtagatcatggtctggtcgttcccaaggtcgagtaatcggaaagcaccgtagatcatcaagtccttcttctcctttcggaatttgatcatcttcttgtagaagctcaggaccgagttcgagtctccaatctgatcggccacattgatctcggtgtacgccgggttggcgaccatccagggcttttcagccgtagtgaaccctccgttcggcgacgagtcccactgaacggggaatcgtccatggtcacgagcgttgagctgagcgcctcgacgtcccttctcgtgggcctcttcgtcgttcgggtagtagtcgtccatgtcggaccagaatccttgcgtctcgcagtcgaggtactcctctcggccgaccgacatgggcaggttggtagtgccgatctcctgtccttggtactgcacgagtcgaagagatcaaaatcagcggcgttcgtcatcttgagcacgtctgtggaccacgtattactcacgacaaaagtggttccggtcatgctcatcaggaagatgcacaacatcttggccgagttgacgcgatattctggggcgtcagagcagtacctggtgaccgatcgagcctggtcgtggttctccctgcaggacaaacactgcgtcagaatcccgcttcagatggatcgacgccggaccgtgtgctcacaagtaggtcgtctgccatccatcggtcttgtcaaccaccttctggtactgatcgatgtaccccttgaactcgctcagcttccactccctaggccagaatcggtagactttgccgaaatccatgcagacgtggtcaaactggaaaaccatgtcgacgatcttggcctcggccgagacgacctccaagaccttggagatgtcaggggtgttaggccattcgccaatagcgacggcgtcatgtttcgaaaaagtcgcttcgttcatctctttgaggaactccatcagccggggaccgttggtccaaagggtgtcagatcgttggtaagtggccgaagggtcgagtacgggagcgtcagggaagtcgaggttctttgaatagatgttgcaggtgtcgattctgaggggtaaggcagatcatgatcggcgaattagctcgtagctagacaggtgtttccccgccgagagcttaccggaaaccgtcgactcctcgctcgagccagaaagtcacggcttcctcatacaaagccttcctgacctcctcttcctcccagttctatcatgaaaccggcaacgtccgttagcctccgcccgccaaatgtctcttatgccggactatctgtcggactcacgaaatcgggctgtcctacagcgaacaggtgcaaatagtactcctgagtcccctcatcccactcccagacgctacctccgaaagcggccctccagttattaggagggataggcttgccgtcctcggtgaatcccttgggctttcgccacatgaaccagtttcgcttcgggttgtctagcgaggaacgggattctttgaaccatttgtgctcgtctgaacagctggaaggagcggtaggcggagaggattgataatgagtcgatgattttaagtgtaagaaaaagtgagaaatcaaggccgaggacttactggttgatgaccaggtcaaagaggaccttgatttcccgtttgtgacactcctcgatgaatttgaaacagtcgtcgagggttccgtaaggagggtagatgtccctgtagtccgagatatcgtatccctggaaacagcgatatgcacgcgagttgtagttgacttccggtaggactccgcttgcatgtcattccacttaccatatcacactgagggctggcgtagtgagggttcaaccagatcgcatccacaccgagctctttgagataatcgagcttgctgatgacacctgggatgtcaccgagaccatccccgttcgagtcgtagaaagatgaggggtagatctgatagatgagagcctccttccaccaggtaggcttgtgctggtggttgtcgccgttgatagtaaaggtggcatccttgccgttcgagtcggtgagggtgatgtcctgggtcatgttggagtctcgtcgtatgttctgtgacacggtcagagaagatatcagaggtaaagcaaggtaacaatcgtgagtatgcaggaagaatgacctcgacgatgcacgttgacctgcattatatagcctacgaggtgacggggcaaggtgcatttcgctgtcgatgactttgccccggacggtcgtcggcgaaggtcatcgatgggtagaattacggcgaaccatctcatcaaatagtggcgcatcacgcggtcgatagggggaaacgcgggggaaggtcttcggaagcagacgcggttccaaggcgaaatccggggtagagtggcgcgggaccgtacatgtgatcgctccgaacgattacacctcggcgattctaagagctgcacctggacctgtactcagcacgcaccatccagctgcatctagccaggcgtcgcgaccgcgcctcggcgcatgcaattccggaaacgcacatctaactgtctgtccagctgccaaaagcatagaggaccgacctgcacaatccccgtctgttcgagtgtctcgtatagaccaaaggaaagatcaacatttacaatcatgtccaagcattgttcggaacatcctcatctggaacacctcttagtgcatttcttgatatcgtttttttcttcccagcgtttcttgcaacttgagtatgggggatcgtgagactgaatgttaaccgctgagggtccgtcaacgcagctctctgagaagacccggtcaaccgactgctcagaacttggtaaaatgcgagggtgtctgctacatgaaccaaggtatccccgagtcttggaggcacttgttcccgaggaccagactagcaagtagtagagccaatcagctctgtgtcgactggcccgcacgcatctcgatgtctgttctctgagacatagacaagcgttgctttctaaactcgccctccgtccggaagttcaacccgtagatcacaacaggttaatctcggagcggctcaagttaatcgtgagcttcggtcgatctggctgggaaagtgctcgatcgatgcagctcaattacaattcttgctcaactcgaagtacgtcccatctgattcaacgatatttcggaaagattctcggcgaacgaggcgtgcggggaacgccgtgcggggtaagtactgtgctcacgtgatctaccggtcgactttgcatcagagagctgtatatcctggcgagatttttatagcgtataggccgagtcaacagatcttaatctgcatgacacgaaaccctagtgatccagttcgcgggttacaggtaggactgcgaggtccccgtcgagcgatttagagactttcgagctcctgcaacgaccatctcaaaagcgcgactgcggatgctaatttccctttacgagagttttgcgcttcacgaattgttcgagatcttgcaagttcaagctttgcccttgatgatgatatgatcatagggccatagggtcagctcgtcagaatcctgtgccactccagccgattcgatacaaccacatcgtcagatttagaatggacaactcgctactagaatcctttctgaccttttcggacgagccgttcgcctctctgctggatgcacggatcttgcgatcgcttgccgacctctcgttcacccaccctacgcttgtccaagcacaagctatccctctgatcctccaaggaaaggatgtgctggccaaagcacggacaggaagtggaaagacggctgcttacggattgcctgctatccaaaaggtcttgctcgcaaaagctgtgagtaggtcgaaatgacggtcactgtttgccagagctgaacgttatctcgtacgggtcgtttgataataggacggcacggccgcgccgggtattcgagctctgatcttggtgccgacccgagagctcgctcagcaagtcaccttgttcatcaaaagtgctatcacttactgcgaaggaatcgttacgatcatgaatgtcgcttctggaaagtccaggtaggtcgagctcaagtccgtggaaaccctcaactcgctaacaagtaatcgtcccgacagcctcgctctgaacgatattcctgatatcctggtagcgactccctccaagtgtctctccttgcttcaggccaaggtagatcctggcaaaaaaatcccgtcattccaccagaggctaaccgactcctacgtctcgcttgaccagaccatctctctcccttctctatcgcttcttatcatcgacgaagccgacctgatcctctcttacggtcactctgccaacgttcagcggctgctcgatccttctcagggatacgtgcctcgagtcggtgtacagggagttctcatgagcgctacgatgaccaacgatgttcaggcgttgaaaggtctggccctgaggaatccggtgagcaacacttcaagcattatgagtgaaatgggagctcaagttgtttctgcgccatcctttataggccgtcttgacgctttcggagccctcctcttcgtcctccttgacgcagtacagcacgcacaccaacgagatggacaaattccttgtcctctatgtcctccttaagttgaagttggtcaaaggaaaatcccttatcttcgtcaacactgtcgagaggggatacagaatcaggctattcttggagcagttcggaatcaaggcttgtgtgctcaacgccgagatgcctttgaactctaggtgagcttgatgcccttttaatgtaagctggaaccgagctgacctccagctcgtgcaggtaccatgtcgtggaagagtttaaccgaggagcttacgactatatcattgcgacggatgaggccgacatgtcgattgctgacgaggttaagggagaggacacagagaaaaaggaggaagccaaagaggaattaatccccagtggaatccctactcaggtcgagactgaagatgccgttgcggaagccgagcaggacgagccggtcgaggaggatgcagcggaaagcagcaagacggcacagaaacgaaaagccgaggaacagccagccgctgcacgatcgaacaagaagggccgaaaggaagacaaggcatacggtgtctcccgaggaatcgactttgtcgccgtagcatgcgtcatcaactttgacctgcctaccacgacgagtgcttatacccatcgagtcggacgaacggcaagagcgggtcagactgggttggctttatccttggtagtgcccaagaagggggtttcgaaagacaagcagattcacctggaaagtgccaagcaggatgagaagacctttcaaaagatcaaagagcatgtcaaggaggacatgggtgccgacatcaaggagtgggactttggtggcaggaagaaggagatcgagggattcaggtaccgaatggaagacgcgctcaaggctgtcacagccaagcgagtacaagaggctcgacgagaagagctgaggcgagagttgttgaacagcgagaagctgaaggtgagcaagcggcagataactttgctccaactgcaagaactgatcgaagcttgtccgcacttgcaggcacatttcgccgcaaaccctctcgacttctcgtatttgcgacacgacgcaccactcaaccctgctcgagtgcaacctcatatgaagcacgtacccaactatctgatgcccaagatcgccaaggtacccatcaatgaggaggtcgagggtcatgtccccttcgcccgcggtcagcgaggcggccgaggtggtggtcgagggggtcggggcggtgcccgtggtggtagccgcgggggtcgaggtgggaagaagacgaatccgctcaagaacttttagatgggcatgtgacggggatcgagaccaggtctttctcgactgtatagttcttgcggatcacattgtaatcgagtcaagagatggctacaatctgtcagatatatatgtacactgccccgggacgtcgtcatacttcggaaccgctacatcaggactatgtcaggccctcgacctcgctctcgagacccttcttgatccgcagcaagacacccgtcttccagttgtccagcttggtcacctgatcatagttgaagacggcctcctggaaggcctcgacgtctccctgttcacatgcgtccatgacgtgttgagcgaatttggcttcgcgggtcgaggggaaggtgacgtccttctgggcgaaagactgcagcagacgctgacacgtcaccaggtcctactccgggggggaagcacagccgttagcgaccagccactctacttgagacgcacgattgagtcactcactcccattgccatactgcacagcgctgctcgaagccagtactccttgacgctgtacttggtcagagggctggacaagctccagtccccgacctgctcgtacagctcgatggcctttccaaggtcaccgatatcggcagatagctcggcagccgactggaagcactggttggcggtactatggaaacgggggaaagcttgtcaactcatgtcctattgggtagaacggggtgtctaagcagatcttacgcgttcgcctcctcctgcttgtaccattctcctgctcgtacgtagctgtcccgagccttggctacatcgagattatcctgggcgtacacttgggcgatctgcgaggttacatatgtactgttatcagcactggggcacagatctcccctctcgtccatgcttgcttacctccttctcccggtcggcagcttggcggaaactaccagctttgatgagcaacttgatcgtctgatgcagagcagcgatagcggctgagagggaagggtcaagaaataagtccatgatcggatgtcgacatcgacatgtccagctcaccttcaggatcggacttcttgtagctcttggcggcgttatgataagcgttcatggcatcgttgttctctccgcctttcagacgacagtcggcctccctgcaattcgtcaagtgcgaaatgagtacggagggtgctggattccaaatttggaggtcatactgacttctcgaaggcgataccactagccctccagttcctctcgaccttgtaggcgtttgcagcctgagcgaagaggtcgcctgcatcttcccatttcgacgaggccgagctgaaccaacccccggacgagttggctttcttctcggcggacttgaggatcttgtcggcttcggatgccattttgtgtgtcgtgtggcagacttgtttctggatggcgatacgcttcagatgctgggtcaacatgcgaactgatgagcatttcactcctgtgcccatcacgtcgtcatacgcattcgatcggagccgcgtttgcgaatgccactttcgattacgtaatcacagcacggtctcacctctatttcccctttcatatcctcccgctaaaatgttccctttcttgtttcagcctcgcgaacatccaagccaacagtacatccgattcaagacacgcctcgataagtgtccaaatattttccttagatgcccattatgttctcgcacaattccgtttcgtcaaatatctctctgtttcctttgcggacagctgcaatcttagaccctttacgacgcgagaacacgggcgtgatcgatcgaaatggtgttacgcagagctagcccaggtgagatttttctcgccatgtcaatacacgttttgactgattttctgtgacctctgacagctcctccgtctcagagacttggcttctctttgcaagtcttcctgggcaagcttgcccgggattgtaatcttaacatgagcgggagccagctgttggtttcggtgcttagtaccacatcgatactgtcgtatgtactaggaaagatgacgactggttcaaggatttacgctcgtgctcacaccgtctcataatagcttcatctggccgagtctaggtctttacttttcctggtccatctacagtctgtggaataccttcctcatcaccgacttccggatcctcgaaccgcaaaacgtccgcgcgttacacttggcgctttttatgaagatcaccctcgccttactacaattcggtaataacttcatatcgatctcttctttcctcggacccgcttggtacctcgtcgtccctggcatgttgagcttccggccgagcgggaacgaaacggtcggggatggcttgcttcggttggcaggatcgctactgccgcccgggttgtttccagggttgatcactttcgcgaggatgtccgattttggcggcctggatggtctcgtgagtgttctgaagacggatccttccaggatggtagggtttcatcttgggcctgctctaggtccgacgtaattttcctggattacacgagtccatccacgtcgcgacatcttcttttggtgtacaggtcagaatcgaacagatcgtaagtagagtttccttcggtggcactacgacgacacaacttatactgataggcgttgttttattggtcctgaagtggctatgtgctagtgctctactagtagtgatacagtaagcgagcctttctattccttctgttttgtacaggaagcttatgctacgtgttagtcaaatgggctacaacggactgggattcgcaatgatctttattcgtaagggaacatggcctagctgcctctcttgcctctatcatactcaatgaggttaccatcataaaacagacgtcttcaagatgtggtatagtctgcgtgtggttttacatccaaggaaagaccaagagtaccgtgtcatatgcgagaacgtcttctgcttctgcatcttggcggagatggcttcgatggcgggcagcatgcctctcctgggcccattgatagtgcagtatgggaatatatcggcttccacggccgcggtggcaatcgtcgggggactgacggggtatagctcgcttgcaggagtaagacgatgaccttttgcgttgattatatttccggatctgactgaccctgacgtggctcaatttcagtattctcgaatgatgatcggagtgctattccgaatctgagaaactgattttgacatggcgcaagtggaatgttacgtaggtcgatgaagaggtcattgaatgtagttgagcattgtacaagtgaaacaataatgtacagacagacatagaagctctagttcgccttcaaagcccagatatctcactctctttggtgcttgggttccgacgatcgaagctcattgaggtctcgagaaatttggtcggtaagtctcgtaccgtaagctgttactcctcccagacgtatcgaagcaggtaacaactatttctgcgatggcgctcatgtcaacaggaccatcaggggtcatatgctgccctggagcaatccatccatcatgactaccgacgcacacagacgagatccaatcaccagtcccagaaacactagatgtctggtcaatcgacactggaacgcccgaacgaggacgccttatcgctgccgctctgagtggctcatggggactcaagcctagcctttcctggtgagtaggcgtccagatggatgaggttcctccgaaccgatctgatccgccagatactggagccggctcctcatcttcgaaggattgtccgagatacgttcctaagcttgcattcggatcgccggtcgaagctaacaaactgtcaatttccccctgatcgtgactttcaaggggaccttctgtttcggcgagagaaagcccttcgagcgccaaactctcttgttctatacccgcctgagtgagtgatacaggctgtcgtgattgccctcccaatgctctgagaccagccctttttaaagcggcgttgtaccttctcctttgtgatttactgggcgcagtctttttgttcgctcctcgctcagtgtcagcagcaagtgggtcttctttcaccggtttctttccctcgctacctgtatcaggttcttgtggtggtccctcatgtcgtggacgagtagatcgggcagatttgggccccgtaggcgcattgagaggggggccttccgaagcgggttgctttccagcgcgttcgttcatcacgtgctgggttgaggaatggtttgtatgagtagattcttgcaggtttcgcatcgtgaaagtgccatatgttcctacaaccgtctttcctatatacccatctagtccggttatcagagggtcgacggcggagtttgtctttgtgttgaaaggaagttattgatgcaagtcggatcacgcgatgtgcggattctgtcgcgcaagatcacaagagcctgctcgctggtttccctgcattcgccatctgatgcactatgtgtgcgatcgcctgggctcgtccatccgtacaggctggtctctcggcgcgaacggaggcaaggtactgacagtatgaagcacaaagcacggatgccgagcctaatcgtaattcgctagacgaaggggtaccgcgataaccttgcaaaataagtcagcacgacttggtattctcgagcattccaccgttcttagattgctgatggaaaccagtgtgtgcaatggtcaggcggatcatgccagctgacaaggttccggcgcgacaatagtagtactccgttctcatggacaagcgatcgctagatcactagtgggctagagagccaaattctttcaactcgtcaggatgatcagcggaccatcttcgcgccaacccgggcaggggaggggggtgagcaccacagccacagtagtacactcatgtgaggtgccatttgcgctcgctcgggcgaaacctgccttcctttgttggcttgacgtttcgtcattcgatcgaaagattagacatcgccaagtcggcaatcagacaagctcgccatttcggtcgcaccgttgaacaacacgcatttcggcgacgaagaacatgcatatcaatcgcgagactttacgatggggttggaaagggagagctgcatgagatctcacatctcgctcaattgaatagatcaacagttccggtcgatgcatacgtccggtcaaattttcggacatttcaggtagaaggctcatttccattggatcccgatttggcggtcgagaggttggaatcccccgaaaccacatcgtattctcgcacagagtactacaattagtgtcttccataccaatataatggtccagtcagctcccggatcgctcagaacttcgctgatctcgatagctcccttgaggcgcacggtcaaaaacgcatttcctcactgccgacttttaggaggtcaactgtaactgcgacccattgaattgatgaagatccttggacgctgaatgcaggtcccttagtttgcggatgcgcttctcatcgtcagtcatctttgggttcgctgacgctccattccttcagaccggctccacatcttccctcaggagctgggccagcagctatcgtatcggtccctgtttctttctgtattcggatcttcgtgttgaggagacatggtagacaaaggtaggggaactgacacaccgatatcggtgggcgggacaatcttcggatccgtccaatatccgacctcgatatccagctgaactgaatatcaggggctgttatgtattactcacaggttatgacatgctaaatcgattgcgggtaaattgggtaccgccatcaagtctccatcagataacccgtcaagtagatcacgcttcctcattctccacaaaggaagctctcctgggaaccttacctaagcctcaaccctgattggctcctccatccctcctgaccacaggatggcatgttagcggtgcataatcatttcgacatcttccttccgttctataagtatcccaagacgatgatacgttccagatccacggaaatctccgtgcttagctaccaatgtatcgcaaggtcatacggaggggataaaccatcttctgcatgatatagaccccaattctcgattcatcgttatacaccagccgactatgaagatcaaatatgttcctttgcttagcacattcgccctactgaccactccactgggatgcagctggatcgtttgttccatacatcaccttgccaagctgcgacttgctgaattgctgcagcatggttcgggggagatcgatcatacctttcgtcgcgcgacctgatcaaactggttccatagtcgccattttgggggaatcacaacatttggcgtccatctttagttaattagtagtgataatgatacaatcgagtacgattaagtggtcaagctcttgaaaggcattttttggcctcggacgagtttcgtgtggcactgctcacccggttaaaatgcatttaggaccatgctgcgggtccgcaaatgcaagcgtttcatcgatcgattgcattttggagtcatcacactcattgaatcacctcatgcggagtagtacagtgttatagtgtccagtgacaaggtttattctgatcagcgttggaatgaggatccttcaacgctccatgacctcaagcatctagctctctatatgcgaccgaccttgccaaactaagggtcataccccctcagtcaagtcaagtgatcaatttactagaccagcgtttcggcaaaccctcgttcataatcaatgaggcagccatccagatggtctgcttctttgttggggggcgttagtaataacctcggtacgactcaagtccaagcccctggtcatggataggcctgattggttactggacatgatcacgaagattgtggcaaggggaccgaatcccccttgtcgcctgggtcatgcatcttggctgaccgacttgccatgcacgagagcccgaaatttatggcctgaaacgagttcaaactcccgcccatctaaattatggagtttatagtctgatagaattatcacgagatcacaagatagcgtcatcttgaggcgggaaagacagccatgagcacaccgttgttgtcgatcggtcatgtggctgacgtgaattggtcatataggtatcagctgatcgcttttatcggtccagaacttgtagattcctttcgccaacacggccgagattgatcctccgaacgagtcccagggtgtaaggtcataagacgacaatcaccacaatcatttgcctcccttgcggatccatagcatagctttcgatctctttgcacgtgaagtaccgttacctagcgatccagccatagatgaggattgatctgatagatggataaaagaagactacctgtattacgcaatctgccacccaggacgccattatgacattggggaaagtctttctcgcttgccggctgcacgtgttcaacaacgaaaacgatcttcatctccattgtcctgcggtagattcttcggtgagtcgtcttgctgccgagtatccgtggatgatcattcacatcggaagttgcacgtataaagtaagagttgatggaagctagcacacattattggtatcatttcgtattctcaaatccggtcaacaaggaacaataccattgatcaaacgatgtcttacaatcagcttcctcccccgcccgtcaacgacccctactcctttccatcgcccatgcctacgtcgcaaggaaaccctcatccatcgccggctgttgctcagccaggtctccctcccgtcctgcaacagcgtgcgaagaccgcccgtcctaagcgcttcaacatctccgtcggtgacgaagacgagctcgaaccagaagatcgcgctgcgcttcttgaaatgtcaaaggaggaatacattcgacacagctacaccgcggggctaccgcaagcaaactgggacccgaatagacgagagctgactatcggattcggcagtcttgagagaagcgactttttcggtgtaaaaccgtacatcgaagcagagcgatcatttgctaccgaaactggcgaatggagcgctctggacgttgggggactcgacgatgttgctgcgcgtgaaattcaagttagttggaaaggaactatctgttccctggaaggtcgtggaaccttcacattcggttcgacgagagaaccgagagggtttttcacgacgggccatagaactgaggccgaaaaaataaacaggcaaaggaatgtccttatgaaccctgctcctccacccccgccgcccgatccggccgctggtcctgagctttcttcgaatggaaggatctctgcgactgaggggactgagctctcgattgcgtccaacgttccagagactactactgggactcagtaaggaagggcgaacccatcgtgtccaattcctttgcaacgcttctgatttttgtgattcttgtacgaccacctgatatgacgttgttgtaattacgatgtttgcgatatagtcgagacatcagtgaaattctgatctgttcgataggactcgggttcgggcaccgggagatctggatgggaggccggttctaatttgcgcattgacagaatcctgcggactgtgacggtgtttgcaagggacttgatgcgaattgagaaggacctggagcttcccagccggactcaaacgaggcggaaacggttcctagatgttccacaggacatactgcatagtgagccatgcagtcgatttgaaatactcacggtttgatctgctgggaaacattccggcccataacatttatccaccgcgtgtctaatttactgtactcgagtacatgcagcgaggtcgaactgccacgtagtaccatattcacggacgctaccacctcggtgcattataaacgacattctgaatgacaaggagtggacatgattgtgccgagtgtatgtctacaggtatatcatttggaacagtccaccggtgatgtgacccgaagtatcgttcatattgtgagataagacggaccccgatgaccctctcagcataagagctgcgactccgtactgatgcgataacttctaactcgcgctagactcgcgcgacgctcaattcccgcttcccgcgctcctcatccaattgaccctcccctcctctccgccccagacgaaatccttgcccaccctcgtctgatccgcctggataggctgccaatcgacagcccatacctgacttcccgtctgtgtcgtcgagaggcaggcgcgctgggagacgtcccatagtcgcaaggtcgagtcggctccactgaacgcgtacacgtcaaatgtcagcacaaaggttgatccgtcggtcggtcagattctcatgacatggacgtgcaactcacccggagacgagggcacgaccgtcgggactcgcacccagactcaagacccagctcgagtgtcccttcaattcggccacggcggcgcttcctcttcctgacgaccctgcagatccagctcggacgtcgtgcaaaacgatcctcctatcgtccgacccggaaaagaggtactgttcccgggaccaacgacgtgagcttcccccagcccggatgacaaggtcaatgtttagccgtgtggctcacctgactgtccccgctccaactcaaggtcctcacgctcatcgcatgcgacgtgtgggtagcgacgacctgtctcgtctcggtatccaggatcatgatctgccccgactcggtcgacaatgccaaagacctcccatccgggctctgcatgcgtcggtcgatcaggaggagcgcaccgagaaacacgaagaggacatgtcaggaacgactctttcccgcccgtatcgactagcaagacctgagatacgagggtgcaagaagccacgtccgagactcacgtatttcaagcacattccaaacttgctcttccccgtctctacgaccttttccaacgttcccaacccagcctcgtcggtttctccctcggggacgtcgttaagttccgacccggcccgaaggtgtgcggggagggtgtagaaaccgatcttggcggactggcccgtcgaggcccagtgtgaggaggaagggtgcatggatagggagaaggaggagatgactgtgcgttcgagagagagaaagcaagcgagcgggcgaaagagcgaagacgagagatacaattatgtagagggagcgggtttagcttgtgcaaatccctcgacgaacgtgaaaacaagcccatcggacgaaaagggctcacctgctccttcctcgctctcctcggtaaacgtttctttcttgcccaaaaccgtcccagctgccagatcagagaggacgacgtttccctcgatggacgtggatagggctctcgtccccgtcgaatcgaccgagagggaggagacgccgagtcggtgggatttgaggtggtgtacgggtttagagggctcggtgggtgacctgatgggttacggatggtgcggtgagtaaggggtgccaaaagtgtcgagatggaaatggggcacggtacgaagggatataagtgtattcatcaagaggagaggggggtggtatttatcgtatgggtgggacttaccagactcggactccgccgtcggcagatgccgagacgacttcattcttattcgtccatgtcaattgccagacggcgtcctcgtgagctaatccataccaccgaaccgacccaaatgttacgattcagctcgatctgtagcgtgtgaccgaggatatcgacgacgagtcgggatgctcctgatgactcacggctcgaggtttgatgttgcaggaaatgcgtcgactagggagcgcgagagcagttcgggattagctttatagcgggacggtcgactgggggttgagagaggtactcaccatgactgctatcgttctgttttggtgttcgtcggatatgtcgctgataatggggttgtgactttgattgccatatggcatggggtacgagtcggttcgtcatgttagatgatgatcgatgcggaagggacgatcggggtaaagtgggtggtggatgatgatggagggcacacggacatgtaaaatagtaatgacgtaaagggccaaagtattagggaaacgttgagatgtccgtcatcccgatttgtcggaggcagttgatcagcggaagtaaactacccccgatgatatacttccgatgtcatcaaatacttccgtgaaccccgaagtcatcgagtgtggctatgatcaattcataacgcacacactcactctactagacactccatagcgatcgattttggtcaaagggggatgtcaacccagataacatccttctcatcacgagctggcacatcccaacgactaatgcaacgatcataatgaccatggcatatcccgtgccacctcaagcgacatcgaggacgatctatgaactatctaaagaggcacacgacgggttacacttttcgcccagatatgcgctcgatacgtacgtcccccgcctgtcctccttgtccacctactgaaaccttgtagtcgactgatgaacgggtgtactgcgcaggtggagacgttcggcggaagcgttgatcaggaaatcagaggaacatcattgcgccggtcaggtagacctcgctttcatcctcatggcccgagctgcagtgtgagcacttgtcaagacgttcacctcttgatgacattcctccgaatcgggggctgaccacacgaatgcactgcgcgaatagcttactcttggagaagatcccgcaacatccagagtatacgcaagggttgacagagtatcaacgggttcagcttcgaaaggtgcgtcccggcgatgtcgtcaacacctctgtctgacaccgttgagcctcttctgtttcctttaccctacgtggatgtccgttccacgtcgtcttggccgacacagcaaggagaagaatgtctgaccacgctagcgacgtacaaatcgatgctctacctagaaccgccttctcacgcaaactatccacccgtctacccgctcgacccacctcctcttcctccacctcctacagccctttcaggaccaccaccctctctccccccttcattacaacccggcgcacccggacctcccgtacccgtgcatcaacggttctctcagccgtactttcacgctcaaggtcaaggtcaaggtccaagtcaaccctacccccctgaacccctgatcaacgcgtgcatccatcctgcttctactatcaatccgactggtccgaacgtccggcagctcccttccatccctgcgcaaccggattatcaaccccgacctctacccaccaccaccaccaccatcgtcccggctcgagatctggtggacgaagcgcaagaacgggaacgggagcgggctcaggctcggcggaacaaggagatcgagtcgagggattacgagtttgcgtgtcagctcgccgaggagcaggagagggaggcgaggggggaaggatcaagttccaggcaggggcagagcagatcgtcagcgtcagcgtcggcatcgacgtccgcgtctggatcgggcctggggttggagagcgcgatgcgggggatggaggtctcgtccagatattccggcacagcggggttggacgtgaccaggatgccggacccgatggattacaagaggaggtcgggggtggggttcacgggacatctggtcgggcctgggcataggcctgggtcaccggggatgggcgtggtcccgaacggcgctggaacggggtatctctacccggatgaacagtctcacgctagacattcgaatcaccctcaaactcactctcatcctctagtcgactcgcaacgggcacaatcgtcccatcccccacctggacgaccggtcacgtatatctcggacgatgcagccaggtctaccctcgcgagacctcgacggcgtcatcttcgtccgctacaggtacccatcacgcttatcccgacgtttctgaggatcgcggcgggtcacactcagcgcgggatcgagatgtgcgggttgctcctcggtgtcatccggccgcttcgtgctcatcgtcattcaagctcctactcgcatcaacactcgtctggccagctccgaagacgaggctcggacgtctcgatcgcccagtccgtcctaggccatcaggaagaggaagacggcgagctcgaagtcagagcactattgataccacgccaagaggggacgtcggatacgtgtacgatgaaggaggaggaaaaggtcattggtgtccagctcgaacggggcttgatcgccctcggctgggtgagccgaaaaagtaacctcgatatgacgatccgggacgatgggctgacgatggccctttccgcagatccatacgcaccctacacagtcgtgcttcatgtcttctatggatttgcacacgcattcggcttatcaacagaccctaccggaagccatcgccatcgtttgcgctccacgtagcgatccggcgtaggtctcgatgtttactttatccctcgttttgactcaacctgaatgatttctcgttcgaggtgacagatttgggatctttcggctgacggaacccgccgggttgatgaccgtattccagtgcaagcgtcggcagacatttcacgaacatccgaggattgccgggggattatataccgatgcggatcatggtgggcacgttttactgaacgagcgaggcagaggaatcgaggtcatcgatttgagacggtgaggggttatcgggaagagcgagataactgtatctatacacgtgtttcagtatgatagcgcttgtcccaacatcttccgccggggtataaggcttgcatcttttggctcgttcaatccacttgatcggtgctaatctgatctgagccttgagtgataccacctatgctactgcactgtgtgattctcaaatccttgccatcttgacatctcggacaactctttagacttgtcgtggacatattttgaagacttcgcttccaaccggacattctcgtcccggtcgttcgtcctcgaagttcgtcgaagaggcataccatcacttgcggcccgccctccagcaactctgcgttttatgctcatcaattccgtgctccagcacgaccggtatatggatacaaccaaagttgagctctcgctcgaaaatcccaatcatttcgtttccccactcgttggcgttgtcgaccgttcttcctgcgtcgtcggcagagacgaggggtgcttgccttcggctttacgctccagactctctctaagcccaagctgatccgacgctctagcctttgtcccgtcttcctgtccatgtgatcgtcgcagctctgcccttttctgcgtcctctgctctctggcttgcaacctcctcctcgcatactcttcccttttcaacgcgttcttactcatgccgtgcatctcgacccctgtccgcctctcaccctgcctctcgcgccgatcgtacgcttcccgctgggcggcccatcggtcgtgatccggtttagcggccttggccatggacctcgtctcggcgatcttgatcaagccgagtaaagacctgttcatccctacccgtgcgatcgcgtcggtctgccctgggagatcatggaccccctgaccgagtttgacgaggtgtccgttgatgtaatccacctcggtcggttgatgcgcgccaatgtggctcgacatggaggagatgttttcccgtgtgagtttggcgacttcgagcgtccggtgggtcagggaaggcgggctgaagagcgcggtgatctcgggcgacaagagcggtggatggaggtcctggtcgaccgccgccgaggacaatgacgacggtgacgacgacgcaggacgggaaagcaacctcgcccgtccgtccgacctcgccgcgagatccctcaagtgtcccaagatgatgcctgaattctcttcactcagcctcttgaccatccttttcatctcgacatccgtctccactgtcccgttcttgaccctgaagagcgctgtgagcgggttgatcaccgcgttgatggccaatttgaggaggagcgtctggtgcatcaggtgtgatgggaggagcgtggaagagaggtctgatagggagaggagggtgtcgagcgtcatttccaaattcttgtgtccgagttgcgggacgggcaaggccggggaattcggtggggtcaagatggtctcgtacggattcgagagggtggatccgtccgacgtcggatcgaatagttccgggaacaacgcccgatcttcatctcccgtgactccgtctccgacatggggtacgacgccgaattgcatcttgccaaaccccgtatggacgatccttctcgcatggttccgactcgaactgacgaggacggtcttgaccccgtgggtcgtgctacctaggacgaacctcggtctcccctgtccgtccggccaaacctgcccgaggatctcgtcatagacgcccataccgttctgtaagagcgtcacacacgtctcgctggtgatccggtgtttgagcaatccaagcgccgaggccgtatccgggcatttgagggtgacgatgagggaatcgataggggtatccggggtgagatcggtcgacagtctcgctaccgcccgaccctgtttccaacgcaacaagggtcgttgttctctccccgtcttttcgtacgatcccaacctatcgacatcctcgtgcgccttgacgagccctcgtccgatatactcggtcgtgtacccttcggtggattggagctgtccgtcacgctcgacatcgatcttgaaacccgaacgcgcggcagtggaccgtgcgcctggttctcggtccgggatttcggggagacctcgacgggagaggatgagcgagatgggtagtcgagggaatcgtcgtcgaatgtgatgcgcgacgagacttcctatggaccctacgccgagctgtaggcggccgaagcggacgagttgggttagccttttttcttctcgtgagagtgatcggggtcggggacttgccacatgtatgcgcatggcctggtcctctactcgctctaccgtccggaacgtcttgccgaggctggtctacgtgctttgccgaccgttgctaggcagggtttccggggttgagcgatggagtgtttgatgttgcttgcaaggtcaagcctgtaccgacatttctcgatcggctagagatcgattcgattcaacaaaccatgaattacattgtctttggatataaagtgatcatcgagtggatttgatttattattttgtatttttgttttgacacgtcatttgtcacgatgacatcatcatcatcatcatctagctcaaccttggttatcaattaattccacacgcccgaccacaccctacccctatctcgctcgacctcgctgaactttgagagctcgctctcgtcgatgttatacgagttgcaacttaccacaaccacccaaaaggcgatacgatccagttgcgagaccatcaaacaagtacgacggtggactcacgaccgatctacctttgcttcgcatcccgccccgcccacaatgtatagaaacgcccgacccgtcatctcggccgtctcgcgatcgacgacgaacaggaccgcccgacgacatgcttcgtccgcctaccctggccctctccgtcgatccctcggcacgatcaccctcgtcggcggatccatcgcactcgtcgcctattactacgattcgaggtcgctcgtccacgaacacgtcatcatgcccgtcgtgaggagtttgaccgacgcggaagagtctcacaggttggccgtgaggatgttgagcatgggttcgtgggcgagacccaaggacaaggctacggatgacgagaggttgggagccatggtacgcaagtgataactcgactggctttcgatcgtccgcagagtggctgatcacccgggcgtgtcggggatagctctgggataaacgcttggacaaccccgtcggcgtagcggccggattcgacaaggacgctgaagccatcgatggcaagtcttttcgattctccattcatcctgcatctcatgtcatgtggactgatccgactcgaccttcgcggcgcactccgcatgcacaggcctgtttgatctagggttcggctacgtcgaagtcgggagcgtcacccctgaacctcaaccgggcaaccccaagccccggttcttccgactacccgaggacgacgccgtgatcaaccggtacgggttcaattccgccggacatcgtcagacgctccatcgactgcaagatcggatccgcgaatacgccgaaagtcacccgtcggatttcccggggtacgacccgtccaacccgttggcttacaagaacctggtccattcccttcctaccgacctgccgagatctttacgcccggggagattactcgccgtcaacctgggcaagaacaagtcttccctcgcggacgatcatacggattacgtccgcggcgtcgaaatgttgggaccctacgccgacctgctcgtcatcaacgtctcttcccccaacacccccggactcaggggtttacagcgtggtgaatctttgcacgacctcttgagccaggtcgtccacgcgcgtgacgccctcccggggagcaaacaagcccgagcaaaggtcgtcgtcaagatcgcccctgatctagaagaggaagagatcgaggggatcgctagggcggtaagggccagtggggttgaaggggtcattgtcagtaataccacggtcaagagggacggtctcggattgatctcgggtgagtcgggtttcgagagagagacggggagggagatctcatccctgactttcgagctgacacctccgaacccctccctcatagcacatcaaaacgagaccggaggtctctcgggtccaccggtgaaacccctcgccctgctcgcattaaagaccctccgacccctcttgcccccctcgatcccgatcatcgggtgcggagggatctcgaccggctccgacgcgctcgagtatgcacaggcgggagcgtcggtcgtccaggcgtacacggcatttgggtacgccggagtagggttcccgaggaagatcaaggacgagctcgtcgaccagttcaacgacgcctcggatgggaaatccggtggggcgttgggtgcaggtgcgaagagctgggcaggcgtggtcaaggacgctcaggatgcatggggcaagggggtcgaagaggtcggcaaggacctgttgcgattcggacaacagatcaggcagggagagagcaggattccttgggaagatctggtcgccgaacgagggatgggtggagctcaacgacgaccacaacaacaaccggatggtgcggtcaaggcgctgtcattcgccgagacgggcccgtcggcaccttccaaggactcgccgttcgcgcccgcagaggcgggaggcaagggcatcgtccccgtcctctcgaaacagctgacagactttctgggtcgagcacagtcggtcatcgggcaggatcacgtacggagcgtagggtcgagtacggccgcatcgacgacgacgacgacgccgacctcgtccaccccgcctaccttgaatcagacggtggaatccggttcgggcgtgcaggaagtcgagcccgaagacactcgaccggccattcagcgagaatcggcacagttggcatgggtcaacgaggtcactcggggtaatcgtcgcgtcgtttaaaagtaggtcaattctagttataccctcaccaaaagcaatttgtacgccacatagtcacagatgcatacgtgaaatctctgagcacgacgtacgggtccggcacggctgcagatgagagcaatcacattcataaaatatatctatgcacacgctctcgtcgagaatgtttacatctcgagtgattctacccgagtcgacctgcatacaagactgacagcagctgatcaccttcgagcgggaggcctgtatccaccagacgaagcgggaggcgcgtccgatgcggcaggggcaccaccagcggcttctcgagcggcctgcctctctcgccaaccaccagccttgacagcggcgacgggaggcgcagggcccgacgaagcaggggtcgaagcggcagcgggagctgcctcccttcgagcggcccagctgccggcggcagggggagcacgagcaggaggagcggcggcagcaggctcggctcgagcagagacaggagcaggagcaggagcagcagccgcaggagcgggagcagaggtagcggcggcctgagcagggaccggctgagtcctgggggcgagctggagtcgtcgacgaccaccttcagctccagcggcaggagtcgaagcggcggcggtcggtgcggtcctgacgggtccctcacgtagacgctctgctcttttacgctcacgttcctcttcagcttcgacacgcttacgagcttcttcaatgtctcgttgacgttcggcctctcgagcagccctacgttcggcagcggcggcggcatcggactcggccttggcagcagcagcggcctgggcctcggcttcggcggcagcgcgttctgtgcgaggtaagcaagagtcgcgcagggcggatcagtacaagagacgtcgtgtgcattcagtacgcggtgaccagactcaccctcctcctctcgctcggcttgcgcttgggcctctcgctcggcctcttccctacgcctcctctcggccctctctctgaggaccttttctcggtaagccttcttctcctcggcaatcttcttgtcggcctcggccttgcgctgggcaaactcttcctgcctggcgctctcgatgacttgcttgctcgactggtagtctcccaacatcctgctgagcctctccttgagggcgaggtcgaggtgatgcttttcgagggcggcctgctgagcggccttgatggcagccttgtgggcgtccttatcggcctgcttttgcttttcgtaatcgttctcgagcaagggtcgctcctcttttcggaaggctcgctcgaggtgatcgacacgcttcgagatgatacgcatacgttcggcaatgttcttttgctccttggcgatctgagcgctctgcaatttgaggagcttttcagtgtccaagtcttccacgccatcgaggtcgaccttgagacctccacgggccttgagggtctcggcgagctttttagcctcggcgtttcggatcgtgtcgatttctttttggaccctgtcacgctccctctgcttgtaagcctcggcctctcgggtggcggcctcgtcggcggcctgtcgagcgcgcaagaccttggcctcgttatcctctcgttgacgcctcgagttgatctcttccaatttttgacgacgacggtcgacaatggcctgtcggtggacggcggccttgcgttcatcttcagcctgggcgagcgcctgggcaaaggccttggcacgagcctgtttggcgtcctcgaggaccgaggggttcaagtactggatcgtgttttggagggcgagggccaagcgagcgatctggctggtctgaccggtcgcggcgacgtcttgcaagttggagacctcgctcaagacgacgggcttgacggcctgttcgtgctggaacgtgatggccttggagacgtgatcgacggcgacgcccaactctcccctctgactggcacccatcaaaaaggtctcgaggtccttttcgttggtggcccagggtccgttggcaaacggtttgacgagacccatgacgtagctgatcgagatggtcgagtagacctcggagagcgactgcaagagacgtgcgaggacgacgggcttgagggctcggatgtagggcgcatagtcctcatccttggagatcgagtctacgagcggggcgatgatcttgcaagcggtcaaggggtggaaatcgacctcgagcgcgttgtacaggtcgacgaggtccgagggaaccctgtggagaatgttcttgttggtctgcgtcgggttttcagccggtcagtcttctgtgacgacctgatcgagcgcgacgcgtgcgcgggcgaggactcacaatctccctcaacattccttgcctggtaggcatcttgttcaagttcaagagcgccatcaacctctgaccgttccttccctctccgctgaccccttcgacctgactgaggggcacggcgagggcgctgagcaagacggcggcgggagccttttcgttgaccccccctggaccggacgaggcggattcggcgtgttgcaagtacctcgcccaagcggcggcgtggaagacggccatcgtgcccgtccctccctctgccttgaagatcctcgtcaacttttcgtaataattggccatcatctctcgcttcaacccctttttcgcggcggggagcatcaacaatccgtgaatatcttcgacggatcggaaagcttcctgccagagttccaactcgacggcgacttcgagctgttggaacctcgtatcgaggaatcgggaaaacgtctcggggtcgctaaagttgatcgagtgggtctgggtggcgtacttttgggcgttcaagaggtctttacggagttgctcggtgagtcgacgaaactcggatttacgcgagtggattcgacagaacccaaaagcctggagggcgacttgctggtagacgacttcgagcctggcgttgctcttgcagacgtcgagacaggtcttgtaagcctcccaagcgaacctcaaccagggggtgacgatctttcgctcgaccctgtccttgtccttgctcccatccgcggcggccccggcggcacccgcagcagcagcagcatcggtaccggcgggttcctccaagagggactcgaacaacaaggtatcgggctgcaagggcaattccaaatcgtcctcgtcctcgtcatccttcttcttgtccgcttgtccttctccctgttgttgttgctcgccgaggacctccttggcctcgtcctgagccgccttcaacttgtcctctgcgccctggatgaacgtcttgaggaccaactcgatcgaggggattgagatcggttgagcagcgatcttgtacagaccgagcgcatccctggcgagtcggttcttgcggagagaggtgcacagttgcaagagcttgaggatgatgggttctagcacgggcaagggggtctttttgaatcggttactgcgggggcgtgcgggggtgggtacgcgtcagtccggaagacgaccgccattacagaggagtcgggactcgggactcgggagtcggactcggaactcacgattgaaagacctcggtcaagctatccagagcttgttgttccgattgcggtccaccgagtgcgagcaggtcttccgaccgctgtgaggccgagagccgagtcgagtcgaggttgtcgcggtgcaatggacaacgatgatggtcgaggacggcgagtagaggaatgtcaagacattgtagggaaacgaacaacgatccgaggagattttccagaagcagtttgatcgatcgagaacgagaagaacatgaagaaaaagtcaaagaagagaaaagaaaaggcatgagatgagtttcctttcccctctcctcgttacactcgcatctcgggaatccgtgtactgaccttgaggatggtctcgggcttgataaaacccctgttcatcttgttaatctacgatttataccgcgttgtgaccgctttttccctttgcttttttcggttcagtggtttccctcgattcgtcctttttcggctcgaatgggggggttttgggtcgagtggtgaggtggggagtttggacctctttttttcctctctaggttactagggatgaagagagagggggggggaaaggggaggaaggagcttgttcgatgtaggtggtcgtgatcagtagttgtgacgacgccgacgaggtgaggaggtctttgttgggaaagagaggaaatcacgtgaaattagcgtgagaaagcgaggaaatcgcagaacagcgggtggcagggcatggcaggcaggggagacacgaggggggagacgcgcgggggtggatttcgatgttttaaggcaaagatcatcaatcaaacgtcacagtcactggctcaggctcagtttcgatcgacgtcacacacacacacacacagccagcctacttgccatatgtgcagataacatcgtcgacgacatcattgcatcacacctcgacccgcgactcgtcttggcaaccacccagtacgaacctatatcgtacatccactcacacctcgaacccgacctttgatccccaaccagcacacacacacaccgtcacctcctctcactcacacactctctccctctcattcgtcatcggtctctgctccaaacgacgtcctcaatcacaagatggcccaacaactaagtcacctgcaagtcatactccccgcatgaccctcaagactctgttactaatcctcccctcgtcccctttcctacccacgcccccgcacgacgatcgacgacgacgacgacgacgccccgcacaccatggtagcggccgaggtgctgtccgcgtggctaaaaactataccaaaggctactctgacacccaggtcaagatccgcggggcgacgtccaacgacccctggggaccctcgggagcgcagatgaacgagatcgcacagatgacctactcccagaacgaattcgtcgaggtcatggagatgctggataaacggttgaatgacaaggggaagaattggaggcacgtcttcaaggtcagtcctggcgtcgcatcgcgtcgtgtcatgtcgttcgacctgcacctggacctggacctggatctgacctgccgtttacaggccctcacgctgctcgattatatcctccacgccgggtccgaaaacgtcgtcatttactttcgtgacaacatctacatcgtcaagacgctcaaagaattcgtctacgtcgacgacgacggtcaagacgtcggcgccaacgtccgtcaaaaggccaaggatatcacaaaccttttacaggacgaagagagactgaggaatgagcggaggagcaggggagctatgcgggagaggatgttggggaatatcgcagagagcgggttgaggggggaagatgattacggggatcgacagggcggtcgaccatcaggcggtggtagcggtggtggtggggggaacgcagggtacaagccggcaaagaccagggacgaggacgatgatctcaaacgcgccatcgaggagagtaaacgcgcggcacaggacgacgagagcaggtccagggcgaggaatcaagagtcagttcagttggatggcgatgtcgttcgtcggtgcggtgcgacgctacgtctcgatcgctcatctatcgcccatcctcgtcgatctgtcatccgcgcagggaggacgaccttcggaaagcgatcgccatgtcggaagaggaagaggcgaaacgtcggcgacagctcgaggaatccaacgccaccgccttgtttgacgataacctgcaaatgtgcgtcccgtgttgcgtgtatctcgctgggcgtcccccgggggcgagtagactgatctgatggggacggtactgcgtgcggcgttgtaggcaagcgaatcagaatttggtagacgtcggttggaaccagcagcagcaacaaccgatgcagccccagtataccagtttcaacgtgagtcggcctcggccccggaccacgcccggacgacggacgactaggtcgagccatgctgaccccgacttcccacttggatgtttttgtttttgtttcttccagccgttcatgcagcaacagatgatgcagcagcagcagcaggaagagtacatgaggcaacagatgatgatggccgagcaggagaggcagcgtcaagaatggatgcaggcgagtgtctctcgtactcgacgccggggggtcgggatcgggatcgagttggggggaactgatctttttcacgtcttttgcgcgtttgtacagatgcagcaacagcagatgatgatgcagcaacagcagcaacagcaacaactgatggcccagcctacaggataccggagcaacaacccgttcgctcccggtggtggtggtggtccatcaatgagcctgatccctgaaccgtcacccatgccccaagtgccgacaccacaaccccaagctcaacctcaacaacaggactttttccaacaacaacccgcaccaccaccaccaccatctcagcagcaggaaaggcaattcgcggtcaagaccaaggatacgaaccccgagttggcagcgttgtgggcgaatcgggagggaggactggatacgtttgggaacaccgggtcgttacgtgagtcccccgcgcgcgggcgtctagcatcttgtttcgagtcgagggcgagagctggaccagctgacgtatggtgcccatgtcgatacgtacaccttcccaggtattcccgtgggtagtgggttccatgagagtaatcaacgggccgtccagcagggtctcgggggtgggtttgggaatacgaacccgttcgcacgtcaacagcagcagcagcagcagcaacaaggagggggtggggagcaaccttttttccaaatctaggcgggggtggaggggagttggagactcgtcgttgtcgccgtttggttcttgcgtgtgtgtgtgcatgtgtgtttgctttgatgttggtcggtgttttgtctgtggtgttggattatatttcgatgtgtttgatatggatatacctcgtttcgttcgctctggctggctcggtgtgtgtggcgggcggggtgtgtgtgtgcgattgaacgcgtgagagagcgcgaggctggcgacccctctgcctttgcctttgcctgcccttgccctgcccctcctcgttgtttcttgtttgttgcctccctctgcctcagcccccctctgcctcgtggtgggacgagagctgcgggcatcacacactactctactctgcacctcgaccatcacccaccatcaccaccaccgtcctatcctatcctatcctaccattctccctcgaccccatcccgtatcctcgtcgtcgttgtcggtcgcagacatcctttcccaccccatcctcccttcccccattgtcatcgacacgctccacgccagctcgaacgcgcactccgagagatcaaaccaatcaccgtaacaacacaccatccatcacacagccttctctcaactcgactgatcgatcctacacctaccctacgattatacgagctacgagacttgccatctcatacgacaactctcgactctcaactcgaatcggattgaataacggataggttgatacagcctctattctcccggacgacgacaacgacgacgttggaagataaccatcacatcacatccacatccacattcacgaccgaggacccttgaatccgactcgcctcgccttgaatcctactctagcctactctagccagataacatcactctagcttcaactccctccgtgctctcacgtcctcctcgcgaaaggttgctacataacaccgaacaacaaacgtcaaacgataggatcagagagaaatcatgtccgagatcaggaggaaattggtcattgtcggtaagtcaagtcgagtcgagtcgagtcgggtcggtcagaggtcttgcaggtggacgtcgtgtagggtggactgtcagcgggctcgtgcgagtgggcgaggatgaggtgtgcagtgctggatgcccggttcggcttcatcctcgtcctcgcctacacgttgagagcgtacacaggcaccagggttgagggttgaggatgagacccggcggtggtagcggcgaagggatgggagcatgatacgcaagagaaagagaaagagaaatccccaacagggggaggtggggggaggtctttgggtggttcgcccagtgcagcctgatcagggagagcaagaccaggtgtagaggacggtgatcaaggacgacgagatggcggtggtggtggtggtggcagcacagtgatggcatatcatcctctcgagctgtatcgcgataaccaccatcaccgtgaccatcaccactgtcaccatcatcaccaacatcgttgtcacgacaacggccacgagccatgcgacccatgcgacccaacgacgatcgagaacgagccgacacaccctcagggttattcccttctacgacgtcgtcttgcatacctttcgcccgatgcgttgtattcgcctcgtcccctttcccatcctccctctccgtttgtctcgatgaggccaaggagaaaaccgcaagatctgtgcgggtgatcagatcgggtcctggtgacaagggtgatcatcggctacagaccttcgccccgacaggaccggtggggtggagcttttagcaaaggattgaacgaggaaatatagacgggggagaacgatcggatgcgctcatccacacgtcggctcgctgtcaggagtgaagcaagtctcaaaatcctgagactcggacgcagactttatcaaaagagtgcacccgtctcggtgagcaagacgacagtcgagcgcaaaaggaaagacccccactcgctgtcgacttgtttcgagtcctacttgctactatttctctttttccgtgtggatcgtgttccggctccgtactcgtctcgttcaacagacccagtttgctgatcgctcgaccttgcataccgaccgattgtccgatattcctctgcatgacctcgaccgcgtgctggcgaaaaacttcacaggtgatggagcttgtggaaagacttgcctcttgatcgtgttctccaagggaatgttccccgaggtgagtcccggctcgggctaggcgaccgtacagcataggatacaccgagctgacccctcgcactcgccctctcttccacggctcaggtgtacgtgcctaccgtctttgaaaactacgttgccgatgtcgatgtcgatggcaagagggtcgagttggccctttgggataccgctggtcaggaagattacgagtcagtcgtcgggacacctagtgaatctcttgaccggaatcactgattcgcttcggacccctcctgcgcgatacgctccactagccgtcttcgtcccctgtcttaccccgactcgcacgtcatcttgatctgttacgctatcgactcgcccgattcgttggacaacgttcaggaaaaggtccgtcgccatggcctgcgccaggtcgaatcgacagtccgtttgttcgactcgctgaccctcctcatcctcgctcgacgcgcagtggatttccgaggtcctccacttttgctcgggtctgcctatcgtccttgtcggatgcaaggtcgatctgaggcaggactctaggaccattgccgagttggccaagactagccagaagcccgtgaccgcacaggaggtgagcattcgaaaccctccccatcggatctcttccctcgccccgacgctaaccacctcgccgacagggacaagccgtcgcctccaagatcggagccaagcactacatggaatgctctagtcgaacgggtcagggtgtcaaggaggtcttccaggtcgcgaccagggcagctttgttggtcggccacaagaagccgaggaagagcgggtcgtccaagtgtatcgtcctctagagcgcgttcgtcgtcggaatcgagggagagatcgaacaggaggacgagccttgcggacgtgcaagcgatggctaggatcaagggcggtctcgtcggagtggcctcttgttcttttcgaccctctttctcttctcccgttgcctttcgcgagtgtgggtttttttgaacgtcttttctagttactagttttatgagcgaaacgatctcgccacgccaccctctccccctttggacggttgacattgcgactccgtcgaggatgacccggcgagacgatactcgaccgttttaatcagcatatacgaagcgggcacgagtgggtcgacctgggagagcggaaagcggaggggagtttcgtgaatcgtctggtcgtcgcacgtcgtcgttgtaggattacggattacgatagctatttattactcaatcatccgatcggcttgggacacttggtggcggtgtgctagcgtcggtgtcaaggcagagacgtcccatagcttcgatgcctttgttcgaggagacgcccacattgattgcgcagctcaatgcatcaatctactcgtcgccccacctgtttatgaacgctcttgggtgctagggtactgtaacaatgcgataccattcaccctctgatggttatcatgcccgagaagtgagacctctgtcgccacgcgctttgtcctggcgaaattcaggatctcttcctctttctctccctctctctctctctgtccatcggacaccccttgcgatatcctgaaaactcacaaaacgcccgtctcctgtccctgataacgatgtccagcgtctcgtcgcccctcaattctccggcaaacgtgtccggaggcaaagtcgagacaagcagctcaaacttctgctagtgcaagttcaccctgaactaaagcatgactggtcgtcccaggtgaatcaaggcgcgctcctgtaggaaggacagtagtggcaagcgaccaaacttatgttcacaaagtatatcactgagcatgtcaagtacgaggagccggacgttgtcccggcagaagatgcaagtagtcttgtcctggcatactatttttttgttgcgatcctcgccgtcggtctttcgttcgcccgagacatggcaggtctcacacagtctgaaaccctgtgcgcaaggcggaagatcgctcgactttgcgtagtcgcttgaaacactctgctgagctacacccagtggatttctaggaaacaatgctgtttggaaatgaggtccagctgtggctcattcggtatatgatgtagaacctgccactggaacggggtttacatcacataatccccaccagccgcaaaccggtcagcttagaaagagttacagagagcgacacccccttggcgccggaaagaggtttcacgcgcaagtcgccgggccggagcggaccgctggaacaaagaggaaaaagtcgaccgagatgaaaccgatcgaggaccctgtagaatttggacaggtggcacattcggtgctgatgttacggtctcgtctccatgtttggtgtcgggttgccgcgtttcagggttcaaccgaggtaccctcaaaatgatggctggctgctctgcgaaacagactcggccacctaaatctaaccacctatatgacgcacctcgctttgtgaagggtgcagccggtatgccgcaaagacgaatacaggcaagaggacggcaggacattgatcatgttaatgtgcccgaaaattcagcgttttgctatggcgtccttttctgcgggcccgctcgtgattcaccgcatgtctttcgggcaagatcacctcagttcggacagactgcgaaccctctataatctgatcgcgagggaaaaaagcactcgagaatgatgagtaaaacacgggccgatgcgtgcgtgcgtgcgtgcgtgcgtgtgggaattgagcgtgagagatgatacagcacgcctgtgcgtctgatggtaccgtgtcacaatgttgaacatgtaggcgatgatgtgtgcatggccctgagcacaaagcggtcggccgaggggatctcgagaatctggggtagtccgcgacaagatgcgcgcgccaaagagaagaaaaatatgccgaggtgccgagcggttgatgggcatattcgacccgttctaggctgggtcaatccatctgctgaacatgctcgactcttccagcgggacttgcattttgaacttggaggtcatccacctttctttgcgcaagagcgattcgttctcaatcgcttgaatgaaccagacgcggttttgcttgggataccgggcgtgtttctttttttgcgggggaggcggtgctggcgggcgtctcgggcaggcgataagtcggagagggaacagatcacgatgccggacacgtgaacgagatcgaccgcggcacttcactgcgaaagggacagaggagccaagggcatacgcaagcgaaagtgacaggtcgtttgtcgttggcgcagacgatgatgatgcggcggggaaatacacgattcatcaagaatttcttccctccatgtccgcctgggtactgcgccgaggtctctttcgttacctttctcatcccgcggcccgtcccctaatttgtgctgggaccgtgattaccggcggccttgggcaccctcgactatctgtccgaccgtcacattgacaattggatgatgcacgatcaagagtaataggtggaacctcgtcactttcttttcactccaccagactccatcttacatatcctgccatatcggacacctagacgaatcataccagatatacacgctggtcgacctgctacgtttctcaaacatagacctgacgaccgacgaccatccttatctccattaaccctgcctacgatttctggtttccaagtacacgaccgaaacatttccttgacgaacccctcagagccattacgattcaacccgatcaacgaaattcacttgaaccacagttcacttttgaaccaacatcttctctaccttcttggaacgacacacccagagtagcacgaagacctcccggtttacaagtcgagcatcgttgatcgcgctccactacgaccccgctcttaaagatattttgccagctcgtgccgtcctatcaaaggcagacatcctccttgatagatcagtatacgcagagcattagacggtactacaggtgagctgacaagctgactgcgtctctgctcgtctgttgaatcaagtctgacccagaaacaacaacgccgacagtacgatagaaacgatcgagcccttctcgcttgagagacgcaaagtggatcgatcacccttggcccatcacggtgaaacataagcgaaaccttgtgctagaacaatgtcggtaccggacgatccattccgttccttacctcccccgaggtccagtgggacgacgccccatgccaatgggatgaaggatcagtccccagactctcaacctaccaacccgccttcaattcacacgccttcgtatgggcttaccgtacccgctggaaccgcagcgagtgccgcagggacgggggccaagacgcccagacgtgtccagtggaactctcacatcgtcaacgtgccctctgtcgagcaacgcgaggccgctcgaccggcccggcagacagtccccgccgaggtcgtcacagacgatggcgagcgacaatctttgaacgccgagggattggcacacctcaccaacgagctcgagaggcatcagagcttgagcagggaagagaggaatcgaccgaaattcgtcatcgggggagatgatcgggatcaggatgaagagttgagcctgagcggcggggaagaggattatgactatcggctcgataccgatggagaagggagaaagaaacggtacggcgggcgccgctcggcctcgattcactcgagcggagcctcgagcgttgtcagcgaagagaccgagtacgatcgaaccccggctcgtgaacgcgaagagtcgggcgatcgagcgggcagtatgggcgacctggaaaagacgctttccaatggggaaaagatcgatgtcaacacggccggtggcgaggttcacccatcggccgctcttccccctcctcaagctctgatccctgaagagagttacgagctcgaacccgatatcagggacgagatgcccgtctttgtcgatcctggcgagaccgacggtctgcctaccctgcctcctggtcacgacaacgctccttccggagtcagacaatacaacgaggccgagcagatgggggctgaagccagcgcactcgtcaaggctcacaagagcgggcggttcggaaacttcttgaggaaccgcaaaactgggttccaaaagggcttcaacggtgttagcaatggggtcacaggtgtggctactggtgtgggcggtgtagcgaccggtgtggggagaggagctgctggtgtcgtgactggagtcggcaagggtgcgatgggtgtcgccaatggcgtcgcaggtaccgttaccggtcgaggtcggcagggcagtgcgaatggtcaaggcggcctccagggtatgggcctcggagggcgacccgggatgggaggtgcaggcgccgtcgctggcggaggtgtcctcgcgtccctgttggcactatacgacaacggtcagaacaatccgtcgggacagtccactcctgccagctcgagggcgcctagcttgatgccatcagaagattcgagcgattccgaggaagagcgcgagagggagcgcaagtggaggaagaagagggagagggaggacaaagcgaggttggagaaggagatgcgacgtctgaagaaggacaacgatgccaagaaccgcaagagctacatcgatagcatgcctgggcgggtcaggtcacccttgcactcgacggtcgggcccagcttgcagcaaaggcgcaagcacgccgtctcagatcctcccgctcccgaaggagatttcgccggcactggcgagaactcggatttgaccgttcccaacgctccgttcgcggccgagcatcgtagccagagtcacaactcgttgtcggcctctggtaggcaaagtcctaaattcatgcagtctgtcaagaaggccgccgacaagttgggactcgacatggacgattttgaacgacccaagggcgccaagaatggcgcaggagtcttcggtgcgctcattcaaggtaccgggtcgctcaccggagtcgcaacgcctttaggagcgacgttggccccgaacgccaaaaggcctggctaccgcctctccagatattcgctcggtgaaggtcgtgacagtggggacgcctcacgacccgcctcgatgtacgagcgctctgaaacccctcagagcacaactcgcgtcaatacggacgattctccgaccagtcagacccagatgatggctgccaccaacgcgctgtatcgacctgccaccacggacaatcgcacgcgtcccactgcgatcgagttgccgcctcgcactcgatctggcaagcctttcagcatcaagtcctttaccgacctgacacacctgcccatgacgccgggctcgcatttcaagaacttcatcagcggcaagggcagtcagccgggaactcctccaagcgagtacggcgatcgcggttcagactactttaccgaaaagcctaccaagtggcaactcgaagacgatcgcaagcgcgaaaagtgggaggccgagaagaaaaagagaaagaaggccaaggaaaagaaaaagcagcaagaaatcttcatcattcagcacgttgcggccatcttggcgaggcagcagttcttgatgaagctgatccgtgcattcatgatgtatgtattggcggtcaaaagttgaccactgaatttctagactcatttctgtctttgccctttctttcaggttcggttctcctacgcacaggctcgaggctcagatccaggctaccgcccgagtcctcgagctgacatgccaggtcgtctccttgcctggtctcgtattgatatcgttcaatgatgacgctactcacaccagtgagacgaaattcttgaagcaagccggaggtctcgatcttcaaaagcttttggccacgcatcatctgtactgggacgtggtgcacgaccaactctcggcagaggaagcttcgaagcagttggacgtcttgatgacgtccaagccgcactatcccctctgggcacaaattgccattggtggattctgcagttccttcatttgctgcgtgtaagtctcttccactctatgtcgatctggttaggcactaacctgcaaaccctgcacatttcagcgcgttctatggcagtttcctcgatgctttaatatcgttcccgctagggatgctcttggtggccattcagatccttgcatcccgaaacgatctatactcgaacgttttcgaaatcgttatcgccacggtccagtctttcttggctgcggccttggcttcatcgagatatttctgctacacagccgtcacatcctccgccatcgtgctcatcctccctggttatatcgttctgtccggatcgctggaactggctagcaggaatatcacttccggaagtgtgcgaatgggttactcggtcatctattcgctctttttgggtttcggtatcgccatcggagccgagttctaccgacgcatcactggtagcgaagtttctggcgatggaagggattgggattgcaggcagactcattacgacggcgcaccttggtatcttcaaacagtgcccgcctggtggtacttcctcatcgtcccgggatattctttctggttgtctctcaggcagtcccagccgatcttggcaaaggaactggtgagttctgcccggtgtgggcgttgttattcgttacaggcactcaaacaccccttctttcttagccggcaatggtgttgatctcttgtgcggggtggagcgcgaatcacttttctgctcgagcattccccaaccgagccgacatcacatccgccattgggtgagccatcgtgttgcctgagacatcagtaagaacgatatgctaatcagcagtcttgtttgacaaacagctcgttctgcgtcggtcttctcggtaacatatggggacggttcttcaaaggaaccaggtaagcgattgctcaaagctgggtcaccgcaaacttctcttactgattcttggtgcaatttcttgttctcagcttcgtcgtcatgttggtcggtgtacttttccagcttccttccggtctcggaaatggtggacttttcaactttgctgccgaaagcgcagacggtagctccaactcctactcgaccggtttccaaggttcgtcttcgtgtctttactttgcacattgatcgggaaggtattgacggctcttgtaccgattcacagttgctcaacagctggtgcaggtcgccatcggtttgaccgttggtcttttcctttcggccattgtcgtccatcctttcggaggtggacgccgacgtggaggatctggtatcttctcgttctaatacactcccattgacatttcacgtagaagaggataggcatacgtgcaccttgtatccatataggcatcggcctcgttgaagggtacgcgcatgtactttgcaatagaggttctgacttgaaaattgcattagggattccttcctttgttcgagatgtctccgtcttcccctgaaccccctagatgctgacgatcagacctgtaagaggcggtccctttctgcattcaacttgcgcaatggcatataaacagcctcacccttatcgtatttcccgactcttaccacatgccaaggagcggcctgcaccaactcaatcatcgcaagacaaagatgccctccatcgcctcagccgacctcgcaccgcaatccaagcccgtgacagacaaagccgcctgctgtccagtatctcatatggatcagcaaaccactgaaaagctcagacttgatccgatctactgtcgcagctgctatcccgagttcgagatcggtcacctggacgccttcgaagctcgcaggactggtgtctacgagccataccaaactgagcatggcctccgtctcaaattgcaccacagaggactcaagggcgcgcctgcttgttcggcatcgatcccgttcaccgcttgtcccaagctgaaaggacaagacaccgaggccacacggttcaaagctatctttgcctcgcgcttgtagacggcaatttggggttgtcattatagatcgttgtaccgcatggctcaagtttgtacaacattacggcgtcgatgcgaagaagcgaatcctgacatgctctatttagtcttcggatcgatgtcgctccgagacgggaccacgttgggaagaggtaccatgggagtcgggatcaggccaatacacccgaatatcaacagatgaaagcaggtcgctatggcaacgtgggatcagctttgtgtgacagttgcaatgcagatagagcacacgtccactcaccggcggtcatagccttgaaaagcccgacatccgttccggttttgagtgctcttacacacgaaagccagccaaagagaatgctaaaggtcaatacctgaagacaaacagactagtaagtggaaggctcaagctgatattgctcagcgaaaccctttaccggtacaatcagccgcaggcgcttcgagcgttgccaaagcggatactacacgaacgcacaaggtagtgaaatcaaagggttgaatgcggtgaatcttgacgttgacacttacgtttggcatgtaacctctaagccatggcaggaagacgaccaggtaaaggaatattgcctgcggatatccagtttggatcaattacttgctctttctgaagatcgatagccttaactcactatcgtaatgctttgcaatcccagggatactatcattgttttccttccgctgaccgtgcacgagacccttatttagtttgatccagagtatgccatctcggtatccattgcgacttaccgatggctgcttgttcccttgccattcagccatgacccctgcgactcggcatccatagcttcccgaacgagttccaaagcatcacagtaccaaactcctatggcgccgatagcaacgtattttccatgtctggctaattgcgagatcggcctagttcctgatatgcttgccgacctaggcatgaagggtgcttcccctgtgctcgagactgatggcattttcgcgattcgctaaggtccccaggaggatttggagcccaaaggactgcgccggcgagataaagcaaatatggctactgtgtagcatgtatagcggtatatagaaattagggtccagatcgacgaatatgttgttgacgatctagtctgggttgaataatcttgaccgtccggtccgcgttagagtgagcgatggtgttcggaagcaaccttgaggacactatttctcgatctggttccacctgtgcagacgttcgaccgtttgtgaaaacgcaagtgatacgatgattcatcgcaatcgtcatctatagaatctatcatacaagatttgttttaggaactggacagagccacgtcgtcacctttcacatcccccaatgctcggatggttcatctcgcgtatctgtccggctcgtgctacgaaaagtttgttttgtctgggaagagaatatcgtcaagactgccgagaggcacagtcgctgtttggatgttgaattttgttttgggctagacgctgtttgtaagcgtctagacggaagggttgaggcttccgggcgcgaggaccaaggtcaacaaggccatgcggatctatttcaaaggcgtataggcataagtgtggggaaccttccagggaatagacccataactcagcgacttacgaaaagaccatatcgcatttgacggaagtaagcggcacgcttgacatcaaagtcgacagcggggtcgatttcgctacaatttgggggacttggtcagcagatgcgcatgctgatatcgtgcccggcagggtccaactcacttgttcctcggaagggggtgcatcacaatggtggtgggcttggcacgttgcaacaagtcgttgtcgatgatgtacatgtccttgacagactcgtactcgttctcgctggcgaatcgttccctgtaacatcgagtcgtcagctaggggctcttgacataacacatagcatgggacaggaccgataagactcacttttgcacccgggtgacatacaagacgtcactcttgccgacgacatcatcaaggttgacgtattcgttccactggatgccagccttggtggcctctgccttgacagactcgggcatggcgagcgaaggaggcgagacaaagttcaaggtgaccgagtagagcgacaagagcttgaccaagctgtgcacggtccttccgttcttgaggtcaccgatcaaagtgacggtgataccgttgacggaacccaactcctctcgaatacagaagacgtcgagcaggctctgagtggggtgctcgccgataccgtcaccagcgttgatgatggggacgggcgagaacttggcagccgtctgcgagcttccgacctcgggatgcctgatgacgatggcgtcagagtagcatcccaaagtcctgatggtgtcacccagagactctcccttggagaccgacgaacggtcggcagcgacctgggtgacctcaccaccgcatcgcttcatagcagcctcgaacgaggtcgaagtcctggtcgagttctcgtagaacaaagtagccaagacacgtccctgcaaggtgttgacggatccgcttcgctcgacctgcgtcctcatctcggaagcaacgctgaagaggtagtgcaaatcttctcgagcaaactgcttgaccgagaggatgtgccttctcgcaaaggcagggtgggcctgcagaccagcgaagggtcgagcgggagagatctccctggtttgacgctgctcactagactcgggacccgggaccgacgagagagacatcaagttgggatgagcgctctcaaaggttgggcttcgagggccggacgcaggtgacgaagtgtttccaaatccgagagcgccgctaaccgaggatcgggctcggctgaaagagttgcgagacgtcctgggagcgatcgcacgaccgatggagctcgaaatgtcccgaccaaggggcatgctactcgatcgtccatccaaaaagacggacgaaccgtaggtgacgactcgatgaacggcgccggcgacgttctttccggccaaaggcgaccagcccgaggtagactcgaaagccgatgcgcgcgagatttcgacctcgacgtaggtctgggtctgctcaggaagctcgtagatggccctggggttgtcgtacagcttggcgctgatgtcgtccaaggtcaacctgccatcagcgacggcaccgagcaagagaggaagagtctcttcgataccggcggtaaccgagggctcgtgcccaagttccttggcaagttggtaaggaacggatcccacggagagcatgtcgacggcgtcgatgttgtcccagaataccttttgctcctcggcagtaggcaagcaggtgcttcctgggaattgctctttggtgaagaagagcgagtacacggcaacatcgcaagtgaccttcaaacccttctctttggccaaagcgatcaagctgatgtcgtcacgagtggcgacgttggtaacgtggatgctgcgtccattcaagctggcgagcaacaagatcgaggcgagatcggtggtcttggcatcggtaatgatgggtcgctcggtaggccaagcggcaaagtgaccggcgatgctggcgaccttgttggcagggctgaactcgttgaacgggatgtacaacgccttgcttccgttcaagacggcatcggttccgatcctgctagcgttgtcagccgaagcggcgaccgagaagaagtagtcgcagtgagcggcacccgaagcgttggcctgagcgacctggagcgagatctcatcctcaatcgagctaccggcgccctgagcggacatgtgcacggtggtgaaaccacctcggaccgaggcttgcgagacttggttgaagtcgtctgatccggtggcagcgataccgggaacgaaggcctggacgttgacgagaccggggaaggtatgcgtctcgtgcgacgtcttgaagtcgacgctagagatatcgaacgcgggcttcctgatgacggcctcgatgaacaacttggcgttcttgacgttggtgatcaaggggatggcaaagtcgaccgccatacgacgcgacttgtaacccttggaaacgtaagatgcaggtcgtcggtaccggttcttggagggcaagttgatgtagacgtcgataaggttctgagccaaatgcttggtcaacgagtattcggacttttgcgggtcatcttcgtcgtcacgcagggcttcaaggtacttgacgggaatcccgtgctcctggatgaaatcggcggtaccagaagtggcaaacaggttgtatcccatcctgtgcagcttctggaccgaagacagcatctcgagcttttctttgaaggaaccgatcgagagcaagatgttcttcttgggagggaagattccggtcgagatcagggccttgagataggcctcgtacttgtccttgccgaaacaggcaacctctccggtagacgccatctcgactccaaggacggggtcggcacccgacaatcggctgaacgagaattggggcaccttgactccgacgtagttgggaggcatcttcaactcggggtaggcccggacgggaatgtcgagcatgaccttggtagccatctcgatcgcatcaatgccagtgaccttggagacaaaggggaacgatcgagcggcacgcaagttgcactcgatgaccttgatttcgttgttcttggcgatgaactggatgttgtaaggtccagtaacgttgagcgcctgaccgatcttttgagtggcgatttcgatcttgcggatggtctcgggatcgagatcctgaggaggcaaaatcaaggtagcatcacctgaatggacaccggcgttctcgacgtgctcggaaatgtagtgcatgaccatctttccgtccttggcaacagcgtccatctcgatctccttggcctcttcaatgtacttggtgatgaccacggggtggtctcgcgagacgtcggcggcttgcaagaggtaggcggcgagatcgtcttgggaaaagacgacgttcatggcggctccggacaagacgtacgaaggcctgacgaggacggggtaaccgaccttgtcacagaagccccgggcctcttcaaagctggtcaactctttccacaagggctggtcgactccgatcttgtcgagcattcgcgagaacttgtatcggttctcggcagtgtcgatcagttcgggcgaggttccgtagatcttgacattttgacggtgcaaggggagggcaatgttattcggggtctgaccacccatggagaggatgactccagacgactgctcgatgtcgtaaatgtcgagaacggtctccaagctgatcgtttcaaagtagagacgatcggcctcgtcgtaatcggtactgacagtctcggggttgtagttgatcatgaccgtcttgcgaccgttggctcgcaaggttcggatggctcgtacggcacaccaatcgaattctaccgaggaaccgattcggtaaacaccggatccgagcacgattacaccgtggtcgtcaaaggtgatgtcgtgttcgctagcgttgtaagtgttgtagaggtagttggtgtggcaagggaattcggcggcaaccgtgtcgatctgcttgacaaacggagagatgccggcctcgagacggagacgacgaacggcgagctcgttggacgagacggccttggcgatctgcctgtccgagaatccgagctgcttggcgtgtcgcaacatgcccgaagggatggtcgaggccgagagcttgcccatagccttctccatctgaacgagtcgctgaagacgggtcaagaaccaggggtcgatagacgacatttcgttcagcttgtcgaccgagtaaccgcggtgcaaggcggtcgcgagggcgaacaatcgcttgtcggtcgggttggcaatctcggtgtcgatgtcctcgaccaagttgttctggcaggggtgtcgcgtaaaacacaaactttaaatgagcactttgaccccgcacaaggtcgagacggttcgcgactcacctctccgaacccggggaacgagtcgtcgatacacctgatggccttttgaatcgtctcctcgaatgtccttccgatactcatgacctcaccgaccgacttcatcgaactgctgagggcggggttgaccctggtgaactttttcaagtcccatcggggaatcttgacgacaacatagtccaagctgggttcgaaacaggcgctcgtctccttggtgaccgagttcttgatctcgttgaggggaatgttaagacccaacttggcggcgatgaaagccaaggggtaaccggtggccttggaagcgagggccgacgaacgcgagagacgagcgttgacctcgatgatgcagtattcctgagagtaagggttgagggcgtattgaatgttgcactctccgatgactcccaagtgtcgaataacgttgacggcggtggtacggagcatgttgtaatcggcatcggacaaggtctgcgagggagcgacgacaatcgagtctccggtgtgaataccgaggggatcaaagttctgcaacgaaccgggagcgacgtgtcagccgatagtgctccccctcaaacgagcccgcgagtgtgcgcggcatgactcacctccatattacagacggtgatacagttatccctggaatcacggacgacctcgtactcgacctctttccaacccttcatactcttttcgacgagcacttggggagacgtagcaaacgccttgtcacacagggcgacgagctgatcgtcgttctgagcgaacccagagcccaatccaccgagcgcgtacgcggcacggacgatgacggggtagccaatgttgtgagcggcgacgagggcctcatcgatactggtcgcggtggccgactcggcgcacttttctccaatctcggccatggcgttggcgaacatttcacggtcttcggtcatgatgatcgtatcgatcggggtaccgagcaccttgacgcctagcttggaaaactcgtctttgagcttgataccgacgttgagcgcggtctgtccaccaaaggtaacgtagattccgtctggcttttcgtgcttgatgatcttgagcacaaactcgggggtgacgggcaaaaagtataccttgtcagcgagcccctttgacgtctggatcgtggcaatgttggggttgacgaggatggtgtagataccctcttccttcaacgccttgatggcctgactacccgagtagtcaaactctccggcctgaccgatggacaatccaccggatccgaggacgaggacctttttgacgttttccctggggtacttggcggcgttgtcgacgagctctccgccgggcatgatcataggcacgagcttgcccgccttggcagactcgaccatgttgttgataaagacgtcaaagaggaactcggtgtccctaggtcccggagcgctctcgggatggaattggaccgaaaagtaaggatcaccttgtcgtcccatccagattccctcgttggacccgtcgttggcgttggtaaacaaagcctcccaaccgtccttcaacgtgtcgacgtcgacctggtacccgtggttctgcgaggtgatgtaacaccttccgctggtcgaacaggtacagggcaagttcatccctcggttcccgtacttcatcttgctcgtcttggcgccggaagcgagggcgagcagttgatgaccgagacagataccaaagattggcacccttcggctctgcatcatcgttcgcaagttgcgcacggtcgcgtcgaccatggatgggtcaccgggaccgttcgagacgaacaatccgtcaaacgatccgatctcctcttgggtgttgaaatcgtaatcccaggggacgaccttgacctcgaccccacggtttcggaaacacctgatctggttccacttcatcccgacgtcgacggcgatgacgcggacgggtcggttggccgtagggtgctggacgacggcgcgctccgaggtcggtttcgcggtgtaagtgacggggtgtcgggtggacaccttggcgacgaggttctcagcattggggtccgcaaaggggacgacgtggtactcttccctccagttggtcgggctcgcggtgtcggttcgacccgaggtgttgttgacgcccaagaacttttgaacgttggagagcacgcccgaggccgaggactcttggttggactcggccgaacccgtcgattcggcgacggcggcggcgactccgaggttgatcccggcctttctggcgaggacccttccgaggatggatcctccctgcctcaacctctttgtcaacatcctcgtgtcaactccccacatggcagggacgccttgttccttcaaccatttgcccagactgctctgagcgagatggtgcgagtagctcgggtggtagttggccacgatcaaggccgagacgtggatatgagagctctcaaattctgcggggagcgaatcgagcaggtccgacgtgggcgggacgttgtgcgcttccgaggtcacggggacgtcggtcgtgctgctcttctcgttcggggaaggtcgagcggggacaccgtagttgccgatcaacgggtaggtgaggatgaggatctgggacgagtacgaagggtccgtcaaggattcagggtaaccgaccatacctgcaagatcgcgatgacaccgggcacgtagaacattatcagttcctccgcttctctcaaagacactgccatgcgccaacgccggtactcaccggtctgaaagacacactctcccgagatgctcttaccctcggctccgaagctggtaccgctgagagcgagcccatcagcgagctcgagcaccatatcaggctcatcttgcccctgtttccactcgtctacgagctcgcctttactcaaagccgcacgcatgagtccttggtcgtccgtgtcaaacccgcgggaagaggcggggatggtcacgctgcccgcgggttgaggggtgcgggggcggagctcggacggctcaggtcaggctgatgggacaataagttcggcgacgatgtatatatttgtctgaacggcggggtagttgtagtcgagatgggcgacaaaggtggcatggttgtcatttcgatatcggtcggtcgacgacgtcgaccctcctttcgagcgagcaccgagacgatcggggaaggtggcatggtgcatgtcactaatctgcttccgaataaacatcgaccgggcaccgatcggaagtaaatgacaaccgaaggggggaaggaggaggcggaagcaaatatcgtttatacggtgaccgagcctcgggccgaggacaaaaggctgaaagcggagggaaacaaccaacaatcaaacaagttgcaagtaggtctgatgtcgcgatgtcgtcgcttgtttttcttgatcggatcgcgacacttgggacgtgtgatgttgaaggacagatgcaacgttgatacatgagggtctccaagacactatcatgctggagggtgtgggcggcgtacccatcaggagttgttgtcgtccccgttcaattgatcgggggtcggcgtgatgaaacgtgaaaatgatcaaatgcggcgaggcaggagacggcggggacgatgagcaggagggtgattccactcaactgaatcaaatgatggcgagccccgcgatcacgaacatgtcgagtctgacgatgctgtgtacaacatgatgcatgatgatacatgtgcactctattagacattgtgacatctcaacaatcacctacatactacgatactttcctcagctaaccctggatgagacaatcagccacgctcatacttgactcaacactaggtccgtcgctttgatccagacaacatctgatcgcaactcgcttaacgctgacctcttttccatcgaccttttccaaccgaagacacaccttccttgcttcccgcctcgcatcataccttccactcgcactcgccatggacccgtccccaaccccttctcacaactacgctggaataggtaccccagcctatacccgggcgctcctcgatcgaccaggaggaggcggctttcaaggtcggacgatcaggagccagacttatgtgcccagggggacggtcgcacatcaagggtttctcgatttgacgagttacgtccccggtgcagggcggggcaacgaagggtatgagacgggtggaggtggtggggccaacgatggtgatggtagggacgctcgatgggaatgggagtacgacgatcaaggtcaaccgattcacacgcatcaggcggaggaattgatcgggatgaggtacgaagacctccctcgtaaccgacaggctggtcgagctgggattcccgatccccgtcaaccggctctacccataccgacggggccccgtcatcaaccgtcagaagctacccagatgctacgagcgatttcccaagcaagacccgctgatgaacccgtactcgggtcggggtacctcggagggtggaaaggcttgatcgaacccgtcgtcgggacgttgggacacctcggaccgaccttgcgtgggagagccgggttgccacacgatactcctcatgacgggcaggcgggaataccggatggtcgggccgatgggaaagagttgcctggcctgccaatgctcgacggggtgcctttgcctaccaagaagataccccggaaacccattcaggcgcaggtagaacctctcgctactgatcaggagcaggcggggacgaccaggccccttgcacggaccgtacggatcatgcatcctcccgtgcatcgattgtcaacctccgcgcagggcaacaacattccgcccactttccggggacctggggaaccgacctggaagccccggggtcagatcgggagcatcctcctcaacacccaacgtctcaagcgatcgggagctggaggaggccaacaggcggtgagcaagtttttcgatacggctcgtggggatcgacgtgggctccccgcgggtggtcagggtcaaacgggaggatcaagaccaggtggactggataagaggacgatcagttggcccttggatttcaggtcagtatggctcagcctttcggcgcacaacgtggaaacatcggctgaggacctttgctggtcacctcttaacgatgatcaatcaggcacgtagctcatgccgaatcagaggaagaagccatgttcatgctcatgcgatgggggatggacgggatgggcaaggtcgcaggtgagcctcgaatgtaatccaacgtgtggcaatcttttctgacgtcgttggctgctggttggctgtcccgaacagacccaatttgggcacaggcgatcaaagatctcgtcaaacagagagcggcagatcagcaagccagagcgatcgctcagagtatgatcaacagggagcgcgggttcgccacgtgagttctgcaacatgttcccatgccggtgggaaatttgatgactgattgtagaggtccgttgcagagcgactccttaccaaacgcttcgagtcatcaatggcatgccctcctcgatctactccgagactacgaacgacacgctcagaccacccttggcccacatttcgacccctggaatccagttttccagtcctggcttgtcgccgggaaccccgacaggcaagtctccgttgtccaaagccacgccgaccaaagtgagcggaacgcacaatcccttcgaaaaggcgttcatggctccgaccgaagaggaaaaagatattatggcaaacgatcgcgagattgtgatacggcccaccctacctctgaggatcaagagcaagaggccggctctctcgacaaataataccaaattgcaagacctcgtcgacgaggaacagaaacgcaggatgccccaagtcgtcaagccggaagacatcgacggtctacctttcctcagcgtgaccggcaaagaggagaccgtcactggaggcaacagtccaaccatccgagctgtcgcgctcactggttcgactcttgatcgagaaatgggcgagggtttgcaagaggtttttgcctcgttcccgacgcgcttggtgacgccatccctgcccacgttagaaaaggctacgtcggtcgcgatttatttcgaaacactctatcacgcgctactaaaaccaccaaagtcgctcgacgcggcccatccgaacaactatatcctcaatcgtcggcgaagagagttggcgctcgagcaagaaatggaaaagagacactgctcagaggaggaaaagacccttctgcgcgccaagtggcgcgaggaggagactcaagccttgcgggagaaacgtaagaaagtagggacgctcagtttcaccaaaatcaaggtgattggacatggagctttcggggtggtcagccttgttcgagaaaaggagactggaaagctgtttgccatgaaagaggtgagttgtggtgaggccaggcgatcacatcgcccaggtgtactgaagcccgctcggagtgtttgtcagcttcgcaaggcggagtgagtaatagttgaatcgccctatcagcttgtgtatgcgaagatacgtcactcatctcagttctcgtgcctgtatcagcatgcttcgcaaaggacaagagggtcacgtccgagccgaaaaggatcttcttgccgcggccgctaattcgagcgcaggcgcgcagtggatcgtgaagttgcattacagctttcaggcgagtctccctttaatcatgccaaaggcagtctcgcgctaacttgtccccctgttgcaggatatcgatcggctctacctagtacgatttccctgtcacatggatttcgagttatggacgcctggctgataggagtcactcaatcaggtcctgacatatgaaggaggaggcgacttgctcaatctactggtcgaacgagacacatttgaagaggactttactcgattctacattgccgaggtagggttcgatcagactgagtgtcttggcgaaattcttaagaggagagcctgccttccttccagatgatccttgctattgaggctactcacaaactcggtttcatacatcgagatatcaaaccggtacgggatatagggacccgctgtagtcagggcacaacttacgcttgtatcatatcaggacaacttcttgttttctaaggtatgactgccttccgctattgagatcgacgagactatctgaccatcgctgtcgatttcaggaagggcatctaaggatttccgatttcggactggcgaacgatctacactgggcacatgatacttattgtgagctcggcatggccgtatctcgcctccgcaatccggttcgagactgagcgccgcatacagactacgaccaacagcgccgagccttgctcaaaaagcacggtatcgacctcgaagagccgtccaagatgaagctgaagaccatgaaacgccgcgaagtcgaagccattatgggtaaagactggctcaatcaggggcaaggcatgctgacatggcgagatggcaagcggcgcaagctagcgatgagtgtctgcgggtaagccaggtggcggatctgatgagagactggcgacgctgacgcattctataggactaattcatatatggcgcctggcaagtgaccgagcttgagatcacggagcttacagatcttacagacttccactcgctagaggtgattcgtggcctaggttacggcttcacatgcgattggtggagtctcggctgcatcggtaaggttgatctgggtcgtgaaatcacatagcaaagtcctgatctgaagttctacagcattcgaatgcctgtatgggttcccgccttttgtctcgggttctcgacaccagactcggcagaagatgtaagattttgcgcgcggctccaagagtactcgtactgctcctttcgactgacatgtaataagccagcctcaactggcgcgaatcccttcgcttccctaagaaaccccgcttgagcaaagggtgcacagactttcttgccagcctattgtgcgagccagaagacaggctcggcagcatgacgactgcttcgacgaaccggccgaatggcatcatgacggcggaaaggagcaatccgtggtctaggagtataggaggccggaacgggcctcgaagcggactaggcgatgacggcgctgccgacatcaaggctcatccgtggttccgtggcattgattgggacagtgagtcggcagacgttgacgggcggttcggagcttctgaactgaacggcaaatttctctagacatccatttggaggaagctccatatcagcccaatctcgttgatccggccgacactcgccatttcgacgacgacattccgaatgaagtcagtgaacaaccctgagcttaaagatagaccttggctgatcaagtcctcccgcagcccctagctcctcctggaggagctccagcaaacgccaccaaggacccaatgctcgccgatcggaaacacggggcccatatcctagatatcaggaaacagtaagtcgccgcagagactgtggtattagtacgtccacggatctttgcgcatcacgtcaggatggctttcgccggttggacctacaagggtcacaagcaggacatggaagggtcagtcactatttggccctggtgcgcccgtgctcgtgtcttgtgatctgagatgcgatattccttcccgcaggcgcttcgaagcgatgaaccaggaccggcatgctttggaatgcgacgtggaaggaccgacgccgtctagaattgcagggacagtcggcaggagcagggcgctttctttataggagggtctctgtggcgtcttgagccggggaaatggatttataatgcttgcttgtatcaatggtatcgaggttgctgtgagacataaagtatacacgaaagaactgagggcggcgatacgagacattgagtgactgagccagacaggccacgtagcgtggataaaggcgactgacctggtccgggaccgctactgcatctttttcgccgggacggcaccgtgcactgcaggtggtcctgcatcttcgttgaaagcaacgaccacatacgctaccatcacaatgttggcggaaacgatggcagcgattgcagcatacgttgcgttgcctgggagtaaggatatgacggtcgtttagctcatgagttcgtctaggtcaaagcaggccagctcaccgtcaaagacgtgcttgatcgacgtgaagtaggtcgtgatgggtacgaatgccaccaagaaggcgaaaagtagtaatttggccaagacattgctataacgttgaagatgagataggcttgacgagcgtgaccagtcggattcacccacctttgaaagccagtctcggccatctttcctacggctacgggactggacatcgggctaggtcgtttatgcgcacaatgcaatagcttcacggtcacggagcaaacgggtggtgcttctgtctatcctggtagtaagaatcttgactttcaacatacaaatttcatgtttcttacagattgcaagcaacgatgaccgagtgacgacgagatggttttcggtggatttaaggggaaccttgaagtgaggtggaaatatgagccgccttcacggcatttctcggtatgcaggttgcatccatcacatgtgaagatcatgcacatccaggccatctccttgatagataggtcgaatgagttggggtcaagcgtcaaggccatactgagctgcacgtagtcccttttctcggtatggacgcgtgcttaagtctcagattgcagcacctacctgtgtttgttcgtgaaagctaggtatatcgcatgtcttttggccgaggggttgtgttgtgcaatgttcctagccagtaagagttttcttgccgatgagccagtgcgatgacgactcttgcgccaaagaagtatagtggttttatatttccccaagctataagcaaaaagagggggtcagaagggaactcattatgtggctcaccatgtcagaaggcttcatcgtgtcgaagttgtcgcatccagacggcatcctaatagcatggaacggtgctcgcgttatcgccggggtcagcattctgtattcttcatccatattcgccatttgtcgagactacgcgcgcgccgtcaacgtttcagacatgaatctgactaactgtcaggatgttccgttcataaggtctggtattccgcgcccgcgctctcggcatagccctacaaagtcctcgattacaaagtccaagcctacaataatgataaaaaagcgtagaaagtcataaagtcataaacaagaaacagagcgtcaaatcaagagggaatcaaagaaaagagtcgatccagtcgaccaatgcaaagtaggaaaccgccagagtgtggggcttacgcaaagcccgctttccgaccaaacgtcttgagaatcagaacagacatacagagacctgccaaaccaccgtatatgaaagcgagagcttgatggttggattgaacaggcgcgtccttgcgttcgtctcggatagaagagggtgcggatgctatgggttgagttgtttctttcaccacaagctccagcctcgcaatctcgagctcggtcgcgcggagacgctcctgcagctcgtcgatcgttttttcggcttggctcaatcgcgtttcggcaggatggggtttgttcggggtagcacacggactatgctcaggttctcgggcggggatcgaagcgcttggaccacgcttgcttggtgcgaagattgcggacaagactcgagcaggtctcaaggtaactcttcgacccaagtcgcgcgaatcttcagtgtctgtttctgatggcgtttctgccggttgattcgaggatccagcgagtgaagtaattcggcggtctatcgttgtcggcagcctaggtttcgacgggattgaattttcatctgagcgagccaacgacccgtaagatggatgcttagcatgtgccgtggggggctggcttgtagtggggacactgtcatcggccgtggcgtcaaaggtgtcgccagcagccaaggcttggctaaattgtggcgacgtgtaggcaggaggcggactgataaagggtgatcggggggaggttatcgctgtcggtttctctccgccttcttcggaacgctctgcccgcttgtccgtagattccggtaaacacggagcatcaaagatccccagaccgatcgtctcacgattcccttcgatcgcgccggcgatgcttgcttgaggaggatgcccggcagagtcctgtgagatcattacgggtctgagaccgccttctgcaacggcctgatcccagagattgcgggtggtatcgtcgcgaacggtgtcgacgaggtatccaaacttggccccaaccctgtgagcaggttgccgatcgatctcggctagaccacgctcgaacctttgtgccctctctgtcaactcgtctcgagagcgctgactttgctgactggtcgtactgagagtacggcccgcacgaggacggacacggtcgagcatgtcgtcttcactgatctcgctaccggccgtcgacatcgagctgatactcctcgtatcgaaatcacgggcaagcctcttcacattgctcgagggttgaccatctccctcttcttcctcgtcatcctcctcgttggcctcttcgagaacgctagtatctcgcgcatgaatcgccgagcttgtcatggtcatgctcgacccagcctcggcagcgacgctgggcgtcgaccaggatatgccagcgatgttgcctttcagagaagctcgacgaagattgcgagaaagactcagcaagacgtcgagaaacggtggcggcttggaggaagaactatatgagcccgtcacatccgattttagttgcgcgcgttcagtttcgttacggcgatacgcgagactcacgcccagctcccttcaccgcccatgagaaagcccttgccggtgacccttcctcgcttgatccattcggtaatatcttggatgaccaaaggaggcaacctcgtaattccagtcttggaatcaggattcggattgatcccatgtgagagacaatgcgcaacgtaatgagccgtttcgtgcgctggcgagcatcgtacgttagtacatataatcgatcatgggacgagtgttgcggagagcacggggactgaccattccagagtttaggatttgactgcaagttcaggcgggtcaggttttctgcttgtcgtacactcggaaagattgcgccacccacgggtaattctctggtcgggccagcgtccgccttgactcccatcttccactcccaaacgcccatgtccagcttgccggtcttcctttcactttccctttccagacctgtgtcgcttccttccctcggtacgatatcactcaggttggacacagagtaccgattcaccaatttccggcgaacgggcggggtgtaggcggtgtagctcgaccctcctttggctttgccgtctcctctgggtggcatacattgggaatcgaccgagccggctttctctggagatctcagatcatccacgctctgagagtttctgaggaaacccatagatctgctcgacctacgaccaggagtcgcaggtgggagagcggtgtacgtgacgacgggggacgtgttggtccgactgagtacagccgacgagctcgaatgaatgaggtacgggtggttgtacgtggatttttgtctcgtcggtgtagaagtcccctgttcgctcgacaaagacgaccttcgtgatcgagaatgcccgaaaggaccttcatcagattgtcccaacatcgatgggagcgaggccgagtgcggcatgatgggcctcgctgttggcgaccccgtcacacccatgggggcgaggtacccgccatctgatccgccaacgttggaactgggtgatccaatagggatgtcgctgggaaatgacgacgaccggtatcgagctcgtggtgacatcgtctcgatcaagggctccggttgtcgccgaggcgtggccatgatggtggggtgttgcagtgtatcctaggtaaggttctccaactgacttgccgtatagcagcggctcattccgttttcacgccacagattattgacctagaattgtccaggtgtgagttcgataggtgagcatagatcagtcaatatgtgttcgacccgagttcacctgatcacttgatcacctacttgctctactcgattgattgcctttgttttgtttttgtttgttttgtttgtgaaaacgagacgccgacgacgacgacgacgtcatggcgcgagcgagcaacgggcgacggggcatatttgtaccagggtcatgcgacagtcaattcgaggtgaatacatacagcgatgatggagactagatgatacagtaataaggaaaacactcggagacgaacagatctgggtatttgtcgtctcctactcgggatcaatctgacgatcctaggaaattctcatcatggtcaagggcaagcggtagcgtttgttgacattgtgctgatggtgactggaatgatctcgtgggcctgtcagcgtgacccgtcgatagcatcccctggcggtgaaggacgagcactcctagatcgtcgtccgatcgtcgccgggtcttcatgcgactggagggcaatcttgcgtggggactgtctcggctctggtccgttcccgagcttgtcgtgatcccggcgtccacgaccccgcgccagggagacgaggtcttcttccgacaactctagcatgggcgtaacgagcgggctcgacaccctcgacgagtcatccgagacttgtctcgaccctgcagcccaatgacggacccgagatgtagctcgcgagttgggcctcgagccgagcgacaagggttccaggccgagactctgccacctctcttggctgaaagccttttgaagcgcttccctcgcccggacgtccgagatctcgatctggacccacggacaaccggggttcggcgtacccggtgtccctggcatggacatgatctcgtccgtcgccgagcagggccattggcacggatagcaagtctcctttgtcagcgacgatagtggtggcgatttgatattgagcaatcgcagagtcggctttttactcctgacaccctcggattgaggtggcgggaccgatgcgggagcttcctcctcctctttgtcaccagctgaatcgtccgatacgggcaaggcgatggacagccgtaacggactggcggtctggttggcagagaccatctgtgggtcgtttgcgacgatcggcaaagatcgaaagtcgaacgagacgggatcctcccgactgctacaccgaatccgcatccagaaccgcaaacaaggcttcttcttgtcctgctcccgacgcctcgcttcggcgtctgcacgagtctttgatgtggaccgcgccttgggaggcacagagacggctcgacgagcaaacaagccagacagggaccaagactccgtgcccaacgtcgatcgctcgatatgcggcgagtctgggttgagcggcaagacgcattggatgatggccgtaccctcttgaaacgccatgcagtggtacaagatgccctatgtcgaaaccaatgtctagtcagccttgatgatcccggatgccacgtgtgtcggcgaatctcacctcggtcctcatcagatatttaatgtatgagatgacattcttgataccgacacagtccggattgcacatccagagcaggtcatctttggcttcgacgtctggaccgcggtcggtgaggaaaatgggcaagggatgcttgatgtcggtcttttcaaacgagatggtcttgactgcaagtcgtacgggatgcatgagcacgatggacgggcttttgatgattgacgtttgactatcatgtcgacactcacagtctttgacgggcgtcatggtcgacgcatcgtcctgccagtacctcccgacctggtacgcagcgaaattcctcatcctcgtatccccatcgatctccatgaacccctcgatcgtccgcttgacgtgcacccattcgtcccaatccgtatcgttcagatcgctccctgtcctctcgtacgacttgtcctcgaccatcttgtccgcctcgatcaggcactctttgactccctgtgccatgatgacgggtgatttgtgcgaggtgccgatcgggtatttacgtccggtgaggagggaaaggagtgtcaggccgatgcaccaaatgtccaattccggtccatagtacgtccgcgtgccgggagggttctgaagggcgtcgacgatctctggactgtgatatgctggactaccgcagcaggtcgtcaggcgaggtttcgagagggaaaagtgagtggccaaaccgaggtctagcaggaggatgtgtccggtcctgacaaagacggcgtggacggtctgtcagccctcgagacgcccccggaccagtccgccgaatgttcggctcggcgcaatgaactcactcgtcgatgagcagattatccgccttgagatctcgatgacacaccctgcccccctcgtgcaacccatccctgacgacgctgacgagctgatccaagatcttgcccgccaggcccacctcgatcggcacggccagtgtgctcaggggcgaatgagagcgtgacagttgttcgacgaggtaaatatgatccggggtcttgatgtacccctgcacgccgatcaggcagggatgaggagggagttgagcgagcaaggtgggttcccgtaagagccgggcggcgatgagagggtggtgcgggtaaagcggggtatgtttgagagcgtactaccggaaacgtaaagccaacacggccgtcagacgatggtccctttggatgaggatgatacggatcctccacggcgtccggctcacaatctcgcctttgatccccctgaccttgtagacggtcgaaaacttgcccttgcccacgatcccgtcttctcccgattggaacgtgtaatccccgacacctcggatgaggagctcatccgccgatcgaacgtaccgtacgggttccggctggatctacgtcgacatccccgccgcaggtaaagttcagcacgcaacccgacgatcaatcacaggtcctccgaccgaaccgacctcgtcaaactcttctaccggattcgcaggtccttccaccccatcttgatccccgcagacgtaatgcgtccccgcgccgtggttgtcgacgaggatgacttcctgcttgacgacgcccatggacgctcgtcgtctctgatcggatgggtgacgtgcgtgactgctcacgctccgactgcgtggggacctggtcgctgccaacaagctcgatgtggccgtcgctttgcccgtagcgggatctacgtcgggaggtaccgcggtcgtcgaggacgatggagagggagtcgctcttaccgccgtgagggacgaatacgacgtggagagcggggaagaaatcgaggtcgatcgtcggtgccgatgagatcctgtcgctcctgatgatgatcctggtgctggtggtggtgaaggttgtcgctggtgctggtgctgttgtgccgcagcatagtggaatggcctgagcatcctagaggtcgactgaatgtcatttcatcgttcgcccagagggcgtgggtatgtaagggtacgaggtctgctacccggtcgggtagagcaggaggataggacgaggtcgttatctcacgacgtccttcggcaatacgacgaggtgagatcggtggcttggagaggacgaggacgagccggcggctgcagagggcggggtcgatacggggaacaggaaatcgaccgaggtgtgatcgccaggaacctcctggatggtagaacgatcgagggtgtgcggtgtgtggttgtggttgtgttgtgggattgcttccagatacaggcgaggccggggcgcacggggtggagcgattgcgattggaattctaccgaaccgaagtgaggaacctttgtggtggtggtgttgcgaggtaggaggtttctattcccgacctcggttgaatatccttatctcgaggtcatgtccgtgtcgatacgatacgatacgatacgatacctcgactctctctctctctctctctctctcagcctcacactgtccatctcacgggggaaaccttgtcggtcgataaggtgagagaaagggtgagagagcggggagggggaggaggaggagaaggagaaggagggacttacgtagtctggtctggtccgagtctagtagactagcgcgcgacaattcttacctcagagataagaagtcaaggcaaacccctcaacctctagaccacgtcgtccgagacaacacccatggccatgcacctgatcttcaagtcccctgtagcccgtggatgcaccaacctcgaatcctttcgtaccgatcgatcgcgaccaatgatcacggcggtaagatctcgttcggctcggctcttttccaaaacttcactttctccctcttcctctctcccttatcgaccggacggatctcgaggatttcagtcgcgacgagcgaaggtcgtcccaaccaccattcgtgcaataagaacagacacacaaaaggccgccgacagtctcgaaggccgcctctgtgtcaagacggattacaatcccatcgctagtccaaagccgccgaaacagtcgtgcagagctcgggtcgatcgttcatgaaggggaggacctaagacttttcgagtccagtcaagacagagccagacttggtgatgaacagtgaaaagaccgaatcgaggcgactctatcgacgcgtcacgcaccctttcacaagtctgaaaaaaaatagctagtgaattatatctttcatgcccctacgtaatcgcttttctctagacgacccgcatgtgtgtgtacttttcgagatccgcttcacgaatacaacctagtcgccccctcgcaaccccctttcgatcgcgagtaccgacccgcatctcacaacgctccctcgccgtacaacgcctcgagcgtgtcatacgcgtactcgttcttcaagtgatagtaattcggcgcggtcccaccgatgaccttccacgcctcgtccaacgcctgacagacctcgtccggcaaaggtcccttttccaaatgttcgaggttagcctctaattgttcctgactcgagaccccgatgatgatcccgtcgttgccacccttgttggcgagtcggagttgggagtgatggacgagccagcgaaaggccacctcgatgagcgtcaagtcgtgcttggcgacgacgggctcgatgagcttgagcgcgtcaaacgtggcgtccttgaagtatcgttgcctgcagagttttccgagacgggatcgtcgtcagtctcgccgagctcgagctcgagttggtaaaaaaacagccgcggccgtacctgtacatcgcaccgctcttggcggtatccgagaacctgccttccttgggaacctcgcccgacttgatcttgccgctcaaaacgcctggatcgtcgaaagaggtgtacaacaatcaggaccacgtcgagattcagtcttgtgatctttgaagatttttgcaggtcggacgggatctagacttacctccggcgatcgggttgtagacgacatagtccaacccgaacctcctcagcgtggggatcaattccgattccgccatcctggtgatcgcattgtacctgcagtgggacgacgcggggtccctcgtcaacttggccaagccgggacgacggacgacgggtagagactcacattccctggtacaaggtcggtcggacccagccgttgtacttgcaagtcaagcagacctcggcgacctacgggaaaccaagcgggtatcaacatcatgtggtacccaaagcaacgacgttgacggctcgggcggatggctcacctcggccgaggtaaagttggaaatggcaaacgtcttgaatttgccttgtttatgcatatcatcgatggccttcaaggtctcttggaaaggggttcccctatcggcggcctgtgcgaggggaaattcccgttcccggggcgggatcagcgtccccgcttttcgttgaacgggccacgacatggggcgtccgagctcacgtgtaggtaaaagatgtcgacgctatccgtctcgagcgccttgagagattcttcgaccttggatttcaagatctcgggcttgtgaccgccgagttcgttcgggtaccacttggtagcgatcgtgagccccctttccttccatccggcctgggcggtgaatccttcctgtttcccaccgacgtagacccgggccgtgtccacctcgtcgtaaccggccttttgaaacgcgtcgaggcaggatttatactgttccaggtcggtcactcgggctccagtctcgtgatccggaccaaaggtcatcactggggtcgatcggagcgaaagaatgggtgagcatgatcaagcgggcggccggggatcccgggtgtgcttagcggggcaatccgacgtacgaccgaggatgacacggttctttccttgagcgggcataatttcgagaaatgtggtagtgtgggatgttcttatggtagctggggtgcttctgtaacgtatggtatgagctctgatccagttctttggatagatcatagatggatagttatatatatatccacaacctccatatgacttgacttggatagagcgagtgagggtaacgccgggcaacgcggtcaatgccccgcctcggaattgatgacctccacattcgagcgggggagtggggcgggagtggaggcagatttaaggtggaaacgtaaaaagtggaggttagtgacgtcacgtcatcgttcatttgataccagagtcaattgccgtttcaccgaatcctgcccagtatcatctcaagactctccatcaggacaacatcacgccgacatgattgtacggtcataaggtaaagtcatgcatgtttatcaattactaatctccccatctcacatgcccagtttgcgaccgttcaacaccgaagtcctccatatccgatcaatcaccctcagcttgtccgacctctccagggaaggctcctccagcaatcgtagatcatccacgaacgcctgtccaggcaaggcaaggtcatggtcgtcgaaaaaccaatcagctcagtctgatcccgtagctttcgcatgcaccagcgagtgcaaagactcaccccgcggtcgctcgtccgtagtcccgccgcccactttcgaaggttacccacggcgaggatgagcaaccctcgatccttgtccgtcatctccctttcaccctgcgtggccgtaatcaacagtttctccacgtcgctgtacatcaaggcgaggccagagacagaagaacggatcagtccccatctccctacccctcgaggcgaggcgagcttgtcttcctctcgttcatgatcacgatcaactcaccggatacctcgaaggtaatccaacctccttcccgatcctcgtctctcacccgtccagacgcgtttcgcccatccaccgagtccgtacaagatcaacagggacggggcgagaccgacaaacgcaaacgtgagctgttgtgagcggagcaagtggtcaagggacaagagggacaaggagaggtcgtactgcaattttccaagcgaggcggtgtgagctcgatagacaagaaagacgtgccgcccgggggaccactcactttggtcttttggacctggattaagagggtccggatcaagttgcccatgacggcgttcttgaccgggctctatcaagcggaagcacgtaaaatcgcccaagagtccgtttagctcgaaacgaggcgatcgctcgtggttcaatgcgaatatgacaatgactcaccctcatctcgctctcgtacactctcaagacgtcctccatattcccggctttgacctttgagctgagatcggaaagaccttcgccggacagatggtaatagtccttgcccagatcgagcaccatgcgttccaacgactatgaatattggacatgatcagtgattaaagatacgccgatcgtggcccttgcagcagagctcacagcctgatcgctcttgacgctgtcgggtgccacgccgagcccctcaccaccacccttcaaggtctggacgaccccttcgagaggttggacgacccatccgacgacccaccctctgacagtctcccccgcgttctgaatctgactgcgtatccaatcctgattctgtctcgccgtacgtgaaccatacttgatgagaggcggtaagaggagcatggggatccacaatcgggtcaggcgggacggtcgaccgtggtcctgcaagggcgaggtgagcgcggtgatcgtctggggcaaggtcgatctcaggatgggcagcaaggtcgacgccgtcaacgaggccggctggggaggcggtggagaggccgtctcgcgacgagatgtcccggtcgttccgttcttggaacgtttcgacggcgtagccagcggggagggggatgcttgtcgagcaggttgagcgggagcaggaacgggcacgtcgagcgcctgacagacgacctggtgcaacctcgatgtctcggcgacgatgacctgtaggttatcctcgctccccgtcgtccgcccggcttcgtcttcccaccgaggcgctcgtccggcgaggaatccgatcttctgagccgcttcgttgcgcgctttacgcaggatcttgatcgaggccaagatttcccggcgggtcaaggtgaacgggttgtgggcgggaaggggcaaatcccgaagcgagctcagcgccgtcttgggcgaggcttgacggaagagtcgggtgacctggacgtcggccatcgagggtattcgaaaggcagactgtttaagcgggttcggcaagagtcgatagacccggagtggaagagctgaggttgaacacgcagctgtcagcgctatgattgtacgaggagcgccgcccttgactcacattgcacgaaatacaggccgacgtcccgcctgctatcgagcatgctctgccagtaattgagatcgtgctcgagcgcaagggcgccttgcatgacctggtccaagatctccctccaaacgaccgtcaccgcccgagccatgatctgagcttccctgaccttgtcgatcggagtcgtcatcacggcgttggattgaccataagctccatcttgcccctgggcctcttgagcgttttcatacaggtcgaccaacgattgtaaaaccccctcgagctgtttcttcgtgatgggcctcgaggtactcagatcgcggagagctctctcgatagtcccagaagccgaagatacttccccagtctccgagttgcctagcacagagatggggatcgagatggggatggtcgagagtgcggtgagcgaatggttgagctcttcgaaagcgtacgacggggtcgactgtcggatgagcgacattttggtgagaagaggcagcaatctacggagcttttgaagaccctcgaaacgagtacactactgtactgaggttgtgttggtgtgaggttaccgccagactgatactcgctcgtcaagatagataggggtatgctctcaccgaagttaagcttgttcctccctgaccttgacgactagctttgcgcgtgagcgggagggaacatgctccaggttcaggttggctcgagctttactctactatcgactgatcatatgtatattgcaccctgtcacctcttgacaccggaacggccctcaacaggatctagccaacagttcacatcccattcgacaaaacgacgatttaggccactgtcggtgatcgagaatgaaatggttcaggtgggctgcgctcccgcaagacgagccaggagagcatctgaccagaacctctgtccctcggttccatagcgtctgcctcgctgttgccggcttgtcatcagtcttagccgtcgacgtcaagggctcgctagcgtacaacttctttctcgaaggtcagctgttgacggctgccgcgtaggttgtcatggctgtactgatacggattccccagcagacacgaccgaattgcgacccggagccaaggtcgtcctgaaccgcggcgagcgtagtgcattcctccgtcaggatggttcgttctcgatgtgagccgtcttttgctagctggcggttcccatccgtttcatcatccgccatagatcgctgacacgctattcgctctcggctgtcacatagaccggacgttcaagtaggagagtatgcgctcgaggtcatcagcaacacacacgctttcgagccggtaagccttgggctcgttgacgcacgatatcggccagctgaaccaacccatcgatcatcgtacagctgtatttgatggtctcggaggacgactcggtctatgtccagccttaccatccactcggcaccccactcacccgacccgctgggacggacgcctcctcctcgtccgacccggcatctccgtcccaacccccatcgtccctcccttacccaatcgtacttcaccccaaaatccgtctctcggacgtcttttacgacgcttccccctcggccggatccaacctcctggggatgctcaaatcgcccatggtcctcatgctcctctttacgggcatcatggcgtttgccgcgccgaaactgctcgaaagcctcgaagtcgacccagaggacgccaagagcgtcaaggagatgagggataggttgcagagcgttcagacgacggattggggcgagaggtcagtccccggctcggcaaggctcacgtcggtgactcggcgtgggcatatcgctggatcgtccgctgacaccctgactcgacggacaggttggcaggaaagctcgctggagtctccgaaaatgcgagtcccgcggtcgcggggagttctgctacgacctcgggcggggctggcaagaaacgcaaagggcgataaatcgcagccagtccaaggattggtactcaatctcgtccgtctggactcccatatcctctcgtcacaatattatctagtggacatgcatctataccggcagacgagcttttgactatagtaatacgatcatgcagaatcactcgagaactaggccgagaaggtgtgaacgacgaaatacaaaaatccagaacaaggagaagaaacaatgtccatgccgtattgaccacgagcgtcaagcaaatccaaagagcccgccctgtcgagagttttaagggcgatcgagcatcggtacgattctctagcttgatagtcgtaaatgaactgcgaaacagcctcgcggtcaaggtggaaggagcgcatatcgggtcgtacgtaggggatcgttaaagggaggtcgattttgcgagtagccacgtagccccacccgcccgctcatcgttgttttgagggaccgtggtgccggtgatcagcctgcgaagcagcctaggctcggttgcgacgtccgcccccaccaatcaatccccacccgctgacgagcatgatgagcgaggtgaagagcatgagggtgattgggtggatggctagcttggtcgccgcgttgcaattggcgcagttccactctgaatacatcacacaacagagaaataacatgcccgatcagtcggctgacctattttaacatcgtaggacgaaaactgcgctgtcactcaccagccagcggggtgtacgactgtggtcgatacaacgcaaactccatgcccgagtacgggctaaacctccctcccgcctgagcagccgtaggacctcgctcgtcgtagatctgcagcctatacgtggctgcggccagtgggacgttgccaccgttctgttcgtattcatgtgggctccagacgatctcggtggatgaaccggggatgacattgtccacccctccggcggcgttggtaggaccgaccgggtaggtgttgccattctgggaacacgaggcgatcacggtcaaggaggtcggagtggcgctgaggtagggaagaagcgaaagagtggcgtgaggtgggcatgaccgtcgagaggaggcacgttataagtgccggcgaagggagctcactagagactggtcaaattccatccaaaagtgacataatttgacgctgcgattttgtagtaagaagccgaggcactcgcaggaggttgctaagaattcccagatcaagtaatattcccgaggaagaagaaacacagtcgagcgagaacgatcagaagagtcccaaggtcagctcggggatcgcctcctcgcatatcgatgaatgtgcatccgtgaactaaccgtcatcgtcaatcctcctgcagcggcagtctgggggatcgagaacgttcccgtccccgtggccgtcgccgtagcttgtcgagagttggcgttactggtcatatcgagatcgagtcgaagtgtaaattagatctaggccgaggcgagatgggcgaggtgccgaggtgatccggccgtctggtctgttctgaacttgacgatcaggcggtctttctcaaatcaacgaggtccgagtatcacgtaagcttcaagaggctttggtcgaggtcagggtacgtgatgatgtcgtccaggttgtgaattcgatttgcgagcctaaagacgaggcgcggcgctcagagaaaaggtggctatgctgatttcgtgttgaggggatacaaagattgattgcctcgcccacgatttgtaggttgaatatggactgggttggactagaagcaggctttctaaagtggccgggagctatgtaaaccttctggagtcgatcgtccgatgtgtgtatcgttgatttgacctgatctgacatgcaaagacaaaggttgatagtcgcccaactcttgtttgtgaatcgaattctcaggaaaaagcttccgaaatcgaaattacgagaattacgagaatacatacccggatgtaaagtgaccacgcacgctatgaccatccaacgtaggtcgtgcacacccactcatacctgcaaaccattattgaagattggcatcgacaactgctaatcctcgtctatcttctcacagccgccttgttttaggaccatttcatacagtattaaatctagaaccggtgacatctcatgcgagcatgtccgacaccgcagccgcccaactcccccagttgaccaaacaagaatcatacctcgccgcttttgaagatgacgaattgcttcccatcatcgccaacaagcgaccctcccggacagagagggatcgtttagggctcgctcaggatcgcttaggtggaggttctttggcattgcacgacgaactcggggaacaattagcaggcgtgagtcgcggcgtcgttcggcagcatcacgtcgaatctccggtggctaacctcttgagggcgcatatgaatcaacctagatgtcccatcaactcaaactgaacgccatgcatttctcgaaatctctcgaagaagagaaatcgatcctggaatcatcccaaggcgtactcgaaagtgagcctctgcctatcgtttcttacccaacctgtagctctcgagggtctgactcgaaacgtcgtgccctcacattaccgcagacaacctcgtcaagacgcaagcctcgaaatccaagctctcctcggtctcttcaaagtcgagaagcacgacctggctgacgttcatctctatcctcgtcgtcatgatcgcctgggtgtggacgtacctcttgatccgcttcacatgaacaggcacgtccgggcgggtgtgagatacgggagagatgtaacgacaatgagacgaacagtaacgaccaacagagaaccagtagaaaagaggttctgcacgatgccggggatatgcatgaatgatacgtctatacgggctgcgtgacacaccttgatcccgactagagatggcccaaacgcctcgaggttaggtcatcctctcggcccggatcaggcggtactgtctacgttcttctacggtcatcaggggccctcccgtgaaccgcaagatctgatattcttggttcttgctgtagaacccatccgacttttgatcgttagcctcaaccccgctcggaagaaatctaaagactcgcctcagtgcaccaagattcactcgaaaggcattcaacgccttgacgggctttgtttcccattcagttctatgcgtcttgctattctccctcgagctgtccttgcttttccccttgcccttgaccttgtcgacctttttccgtacccatcccttggcgttgatttcctcgtctgactgaacctggtctggttcgcaagtgatcggtcccgcatccacatgctcctcaagctggagttcggcgtccaggcttgatgccgccgaacttttccacccttcgatcgcatcgcgtctgacgtctttggggatcgagctgcaagcaagatgatgacatcggtcaaccacctacaggcctcgagccggcacggctactcacctgcccggatcaaacaacaacaggtttgtattgccctgagcattgatctcgtaacccacgatggtccttgaatgaccggaatgctgcggggcccctcacaggagggtcagctctacctatacaagtcgcaagcaggcggtctcacctgtaaaatcagtggcaatctgctggatattcgcacggctgtcgaggactgcctgtccattaggttgtcaaaggccgtcttgctctgttccacctgatctgttgcaggtacttgatcatcgtggtccttacccggcacagcatggttttagcgcacctgctcttggcaaatttggagcctaaacggatgactgacaaagtatttctggacgtacgccgtcagtgcagaatgggtcgccgttgtcgagtgccattttgctccagtcggtttggggaagtcatctgtttcgattcatcgtcttcaatatggcagttcttgattccggcaatcgtgacacgtacgaaggtaacaactaatgtacgagtgattacaaagccgttaacatcgtgtccgttacagacatccatctacatgcttacgggacgcctctcgctaccatcgcagcgtagatatctgggtagggaagattgtccgacttcatctaagctgatttcgagacgaggcgtccatcctgatttacgaacctgaggttccaatccatttctttgttcccacaattttgccctgcagctgattccgcccctgtacatcgaaacctgcaatgtttcccaaagctcttcagcattcgcgacggctaccacccatggtgtgacgcgaccgaccagcgtcccaggcctgttgcatccagacttgcaagttcctcactccaggcgaatctgatttccctgccgggtctgccaagggaaaggctggtcgataatgcggggcagccactagaagcgccgataatgccatctcaagattgcgataaccgcaaccccaaccttggcacaacgaagtcgtgagtatcgcccgaaaaggtcgcatctatcggacccgcgaagatcgacttaccgctgtcaaaccccatgctattcttgatgtgacaaactccctcggtgcacaacaccgcccgccgcgtaatcccttgagaatgagcagccgatagaatccttttcaggacaggcgtgagtcctgtataacgtgacccacttgtcaatctcgaggctttcgacatcggccatgagactcgatctactcacctggcgaaaagttcatcggcaggcggtccacggagcaatcaacgggagaccacctgatcatcacaagcatatcttcagctacaagcggatcattgatgttcgatgccaggtggatgtaccaaagatcgcctttttgtcttgggtcgcctgctttccaggtcccgttccccaactgtggtatccggccttttcgcagcgacttttccgtaatcgtatctatctgagcgtctgtctggccatctcttgggccagatacgccgctccatgaatcgtttccgtcatcttcgttcgagtctggtagggaaagattcatatcagattgagaggcaggctcgagcagaaggatgagggcaagagctggacgaaccaaggcaagcgttgacgtgaatctgtttttcctctacactgtgatattccaaggctgttccgcagactaagcattcaaatttctccacttcgccccttgtattcaagctttgtcaggtttgaacttggcgtctgtcggtctcagcagaagagctcacgctggcggtttggctaatccaattgacaatgaatctcctttgctcgacagctcctgatcagaacgcttcctcttgaagcccgattgagtagcatcttcagcgttactactgatcaatccgatttccgatcccaacgttcctgctagaggatcttccccgtctccatagtgactagcaacatgagcgttcagcagttcgacatcaacgtcgaacgagcggttgcaggccggacattctagcatgtggttcaaaaggcctcttgcaggcggacaagtgacaagtacagggagactagctttccatgagcgatcgagtcccctacgctcaatgatctcctccccaaggacgggatgcttgtatcctgacgacatcatctgtacatcgacattaaagtaccggtattcacgccgacgaatcaagaaccggaagcagatctcggccccggaatcagcaaacttgtgccagagatcgaccgcaacacttttgccgtccccaagccagtgatgtatggcaaatgacctgcctgcggatatatcaaatacacatttctcgaggtgtcctcctgaattatctttgaacatgcatagtatccgcggctcgagatgatttcggagagaattcggttgttgtgctcgatcctatggttcggaccttttccagacgcatgagggggcatcatgagctttgtttgtcaacgacttcaaaacgaaagcacctgtacagaactcagaaaaatcgtcgcactagagcatcactcgcctgacttggtgatagactcgagaagagggaggccaaacctcggaaggatgtcacctgaacaagaggaacaacgttcgtcacaaacggatctcaggaccctaaattcacgagatcacgagcgtcacatgatggtcctagtgagaagctcgttctacgccaaggcttggcaacaaaatagtgtgggatatgcacaatggctggctagtaacgtccggtgtatggccgtaccactttcagggggtttaaggataagtgtgctatggccaaacaagataaggaggtaaagaaggcgcgggctgtttgcgcctctggaaggacgatcacaagcctagcggccctcaggcacacagaaggataggtgaaacacttgcccagttccggagaatctccgtacgggttgttgatctagctttcttgccgtttagctttcgttactattctacggactgcacagctttggcaccggcctcaatgcaaagcgtgtgcgccgggaaattcacgccgtcgatcggcgggaactaaaatcctggttctgatgccgctccggggcagatcgttgcctagcccgcctggaaataaccaagacctttcgatccagtcccgactgcgaagagggaaactgggaatcgactcacgttctcgccttacggtatgagtgccccatggagcagtcggcaacccgtgtgggcctggagtgaggggattcatcagcaagtcaaaaatcaaaggcttgtcattccgcagtcgatcgaaggccagatctcgttcgcatttagcgccatcgtcgcctgcaggtgtatatatccagactgttattgggcaagcagtcccacttctctttcccagccagagtattacttcatagcttcgcaagattgacggtggaatcatgcgcacgatctacctcttatcgctagcactctcgaccgtccgggcgaccattacaggccagcagcaatgtagccgcgtaagcagcaccgctcaacagcctatcgaacgacatctgatccaaattatctaggcaatgtgtgtgaccggtctgcacgatgataccaccaataccgacacttgtaagccagccatcgacatcatggatgatacgcgttatgtacctcgctgaatcgctggaggttcctgacgcgcagatacgatcgccggtcccaaatcgggagacatatcggcatcaaatttcggctgggctgcgatgtaagtccccaggcgaggctttctttagcttcactactaagtgcacctttattttactcctctcctagtggtttcggatcatccatgcgtgagggaaaaagacccttgttttcgttttctcaggaggtcaagctgaacctcttttcgtttaggcgggagtcctatggtcattgtttggccgaacagtgacggtagcatcacgatcagtcaaaggacggcctctgggaatgttcaacctgatggtaggcagactcattctccgtgctacaatcttgcttgagactgatagatgcttcccctgcagtggtctccaatccgacgcgcagcgcttccctggtctcgtctcaatcgttcgccaattcgtcggggaccagcatgacctttaccatgccatcggacgcgtctcagctcacttcgggatcgacattcgatctgatgtgggcttactcggggaacaacccgtcctcttccgcggtagatgccaatttacgacagcattctggtgcaggagttttccagttcaatcttctcgctcagtattctgttggaggtaacagcaccgaccagaccaccggcaccgggacagggtcagggactgggacgaccggggagtccagctcaggtagcggcgcgacggctcagcgaaacatccttgtcgcccacgttgtcacgggagcattggcaaccatgctgttccttcccttaggtatcctcgtccctagatacgcgagggggatgaccaccaaaagatggtggttcccggcccattcggcactgaacggactgatcgcctttgccctggtgattgcggcatatgcgattgggtcatccaagttcggggatgcacaaggcaactcgcctcacccggtacgtccttgtcaagatgatgcaatcgactggtcgactgaccatcgcaaatcggtagaacttgggtctggcactccttgtcctgatgggtgctcagattgtattggggatagtcgcgcactggatcaagattcccatccgggccatgcagaccgcttccggacggaatccggtacatctcttgcacgtaggcttgggattgactacagtcgtcattggatgggtgactgtgtggtacggtgagtatttctgtgtctccactgggacaggacaatcaatctaacctgtacgctcggttttccaggcatgggcgatatgtggacggacaacacgaattacaaaccggttggaacaggctacaaggccggctggggcgtcatcgtcggcgtagtcatcgtggcatacatccttggtcttgtcttcttcctgcccaaacaaaccgcaatggagcgggagaacagggagcgcaagcacgacgagattcccgagctgcgacagatcagcccgaactctcgtggcgcttaacggccatgagtctcatcgcacctagactggatttgcagaacttcctgaagatacttgcgtataccttatacccgatggtagataattactattgccacaaggcctagtccaaccatatgtagaacagagatatatgtaaagacgtcgtgtgaagtgacgccgcgattcgcttccggtcagcggaagcattttgttatgagcttcggaaccaaattcgtcgcgtgtgcacacttcagagcgggttcaagatcagaggttgtcgagactttagagcaacaattgatgatgtcgggtagactcgccgacaggtgaattacgcatgatctacccatttacactcataatatcaacgtagctgaacagtcagaattcctacgaggcggatcatgctaccgataccttcgacggcctaccggtcaaagccgcggggctcacagtcgtactttgtctcgggtccatcgactcttccaaaatccatctttgagcgactacggacaagggccagactcaccaatctcgctgtcggactaatattatcaatcttgagtctgtccgtatttctcaacctccgacattggtcagcgggaggtttgggtctatcgacatcgctcgatcctactgtgcggttcagctcccctaggaaggcgacctcggtcggcagcatagagaatacgatcgagcggacaccagagatggctgggttgagtcacctggttatggtagctggacatgcaatctggaaaggctcggatcccgaagcacgaggcaacgattccgaatgggtcttgacgccgattcaacgtggaggcagcgtcaacacgttcttcaagcacattgaagctgggtgagtacaggaaagggagtattgtatcattcgttctggactaattcgggcaagtccttggcatgttcagtgtgaatgaggctctgagcgatcctcagagtttattggtgttttctgggtgagctgcttcttcgccggagcgtaaacaaatggtactaattctgcctcattccgcttgagatcagcggccagacccgcacagataccccgccaacgaccgaatctcaatcatatctccgattagccatcgcctcctccctcttacccccagtctccgaattccgaagagctacgaccgaggaatacgcgttggactcgttgaccaacctgatgttctcttatgcgaggttccatgaggtgaccgggaactggcccagcaaggttactgttgttggctacgagatgaagcggccacggtgagtcatcccgaatccttccctcagcgacggcgtggagatccatctctgatctgttgaactcttcgatgacaggtttgagcaattgcatcgggctgctctaaggattccaagccaagtctttcggtacatcggaatcgatgatgaaggtgatacatcggcatcttacgaaggcgaggttagtcgggtcgatcgagcattttccagaaattatgtcttgtggactaaatcatattgcccccttcgcataggccacgtacggttaccaaccattttcggaagacctgtacggctgcttccctccgctctcgctgaaaaagacatcgcgaaatccctttgcgaggtatcacccgtaccacatatcgagccctgaaatcgcggatctcctcgagtggtgtccggtgcatagggcgcacgctcagcgacccgagggacaattgggtgggggtgtctaccctcatgtgcttccctgggtcacgacggaacctgtagatagctcgtggagtcgggaacaggattgagggcgggactctgatgatgacgatcgatttgtacagaccctagatgcgcgatacagtacagctcgcaaggtcgagtgatttcatccttgacctgtttaccgtcatgtggctacctcacagcaagctggggacgcgggacgaggcgctgcggccggtttcgaatacttctacaggccagcgctatggcaaggcagaccacactgcagctcgatcccgcttcggacggtctcaaaagggttgaagatacactcgagatgtaacgctgtcgatgcaatcttgctgagtcacgatggcggcctgacatctccatggaataaagaacaacgataatgaagttttgcctgtaacaaggcgatgtgcactaaaagctacaatggtttcagaggtggagcggccgtacctctgatggtgggtgtaaagagtacatgtcgtgaaaagaattgaacagcccgtcattatttctcgcctgggaatcatgatcctcatggtccttctgtcatggcgtcgatgctggtgccaggaaggcccttcggcactcgccgaacacggagtaaaaagtcgtctagctcggcaaagttctcatcgttttcggcgaatttccggtgtcgtctgcccttgatgtgctacgagagtgacagcgttgtctttatatcagcgttttgacttgggcccagctgcggattgtgtatactcacggtatcgaaatcttcatacttgacgcgacagttctcgcaatacccaggtttcttctggacgttggggttcatccgttcgatcctgaaccccatgctccttgctcgcttcagctctcttcgctggtaaccagtcagcctagctggagctttggcggcttgcaagatagcgagaaccttctgtctggcctgatcgtccatcgactcgcggtacggttcgccatattctccatcgacctctccgtcacccgtctccgattcaggttctgcgtcaacgaccatctcgccagaatgtccggtcgaggatgacgagccgcgacgatgacccatgccggtcgcgtctccattccaagtcatggcgtcatcggccaactcggcgccgccgatgatctcaatgtcgtcctcgtcgtagaggtcaccacctcgtgccacgtagacggggtccccactagcttcgatcttggtcgtttcgagtcttccgttggcagccgagagcttggcagcggtctgtcccttcaagagctgcacacgcttgctcatctgcatgatccgcctgtccttgccttgggagactccgctcattccgatagcgtttggggtcaaattgacgcccgtcgtcgatctgacgttgctggtcgaggcgatgttcgaggtcaagacgaccgagttgcccgaggctgcctgatatggcatcatgctgtcctccccgacttccgctcgaccggtccgcactcgttcggcgaggttgttgagcgacgttgatctcgtcaacatgccagtattcctggcatgttcgtcgaacagcgcagaccctttgactcggctcgattcgaattcgctctgttccctcgtgacccacgtcttccatgccttttcgcgcaactgcttggccgtgtccgtattcatcttggccgtctctgacaatcgcataaaagtctcgtggatgatcggccatggagccggttcgcccggacgttgcttgggaaactctttcgccatgatcgatcgactctcgccggtcgcgtcgtcgatgaggaggtagtgcacgcccttgggaaagtagtaccaatccgctcgaggtgccgccttgtctcgctccctggtcccgtgcagacgttcatcttcgagcaggtaagagaggtcatcttctcctcggatcggtgccacaggggcgacgtgggtattgcgtaacagatagtcgaggatgttgccgagttctggatgaaggcaagttcttatgatcagtaagggggatgacgatcgattactttgtcgagcgaggtcaaacttgctctgtagattccagaccttggtcaccatggccggttgcctacaatttcccacgaaacgatacaaaatgttagtcctgcacattgtgcatgcccgtcccctctccggcctttaactcacgtcttttccttgccgtccggtccgcccacacgtcgggcgctatccgccatcatcttttccaattctactggtgcgcctcgattgctgatatagtgggttatccgcttggacaaaaaatcctcgatttgctaccggtcgaggaacgtgaacgaaacgtcctggtcagcgaacccggcctgacgtgagcgccaccgacaagactcacccctcccatccgcctgatcccctctttacactctttcacgctaaaccccttttcccctccgaccgcgccccgcttgttggggttgatcagaaactcggcgtcgaaacaaaagacgaaactcgggaaggctttggtatacttattcttataatccgcgtgattttcttgcttggacaattgttgttgttgttgttgttgttgctgctgctgagatgtcgtctcggcggcgacggctcctgattccgtcttgcgtcgcttgttcgccgatggcccggcaacagcgttgaccgtgccgttcaaatgcaagttggtgatccccggttgaggcagggtgttgagcacggatcgggtcgaggtggaagtctttgcatggggcaggatgggagtcccggtgcgtttgctctgtgatggaggagctggcggtttgaagaggggcgagcctgtcgacttggtattgttcaagcgggcagaaaggaagggagaggccgcgtgtgtcgactttgcaactccattcgacgtcgtcgcggggggttcgtagaacacgtcgggtgtcgggaaaggatcgggtacgggtgtccgatgtcgagtgggttcgagcgtcacggagcgtgaagtcggaatgttcgacctcgacctcgaccccgaccccgtggtggctccgttcctcccgctcatcaacgtagacctggccccgttattcatcgccatggcaaacggactcgggatcgttttggagctggagttgatccccgtcgtggccaccccacccgtgaaccccatcttgctcctcttggcttcgagccccgcaatccccttcgacccggccaaggcggtcgtacctgcagatccaggtccatcgttctgatcctgcaccctgccgttccccgctgctatggacctcctggccaattcgttcatcccgatctgtcgaccggacccgcccactcctcgtcctcctccggttactctgcccgtggtcgcgtccgcgtcggtcgtcttgcctaccgtcgagccgctccccgtcgtcgcgtgaaagacgtctaccgcagggctcctgatgggtataggatgctgatgctgatgatgatgctgaaacctggatcgtttgaaggggtcaggtttcggcgagagggttgtcatctctcactccccccttggcggttttccaggcgggggacagtcggggtccgagtgatgggtgcgtgcgcgccggtctagacctgggttcagacgagaatcgaccgttcgattgtggacgggatcaagaacggacgtatcgctgacaaggactttgaagaggtgcaaggatcgtggaacctagtctgtaccagtccaaggtgacgcgatctcgagccagtggtacgtgatgcggatgaggtcgtgttgaggaaatccttttactcgttacacgcgcatactctcgagtcctttggacgtgggatatccggagaaaggctcggctctgtagcctgaacaagatccagtcgtcgatatggtggtcggtatgtcgctgggtcccgagatgcactgatggttctctttgcgacaagacgaggaggctcgactttggatggattttgtgtatcgagcaggtcgagacttggttcagttctcacccaaacgcgtccaaaagaagagaaaatcaaattgtcaggctcaggttcaggttcagtcagaggcagagcaacacacacatcgacgtcataggcgacaatgtcagatcatcaacaacgtcgtcgaagcgagtcaaatcagagcatgtactatgtatgattcagctcttgcttgtatttaccatgtcgagaaccgtaggacatcgtgtcgaggtctatcgaggtcgtcatggcatgtcgacctgctcgtgatctggggtctccacgttcttcctctccctttctggctgtcgggttacgtgaaatgtcaaacgcgaccaggagaatcacgcgcggatggggggtcgtgtcggatcaaagtagacgaaaatcgcagacgcctgacgcacattatctttggtggtctggtgattgagaactagcaagcaagaacatggacgtgctctcgacgacctatcgagacatgtgacccgaccccacccactcgccatcccagacacgactctgaccccggtgtttgttgtttctgagtagatgccggaagtataaatcgataccaccccttcggaagtaaaatggcaacgccgaggtcgattcgattcggggaatttcccgcgagaaaaggccaaaaaagtggaggcgaaatgtgggactcgtcgtgttgcgtgttgtcatctcgttggattccgagctcacatcatccatcgataccgtcatatctgtcaatccaccgaggatcgagcggagaaggctagatataagtctcactttgcctgaacctgaggttatatcgaccatgttatatcccctcacggctttattggcattcaccacgatcgtcatggctcgaccccgcgtcctcgtctttacgtcagtccccatgtgtgacccttttacctcttccgaaggaacgtccgatcttatcactattttcgctccctccgatcatcttgttcacacagagctaccaaagggtaccgccacgattctatcccggactcgatagacgccctcagcaagcgttcagaggcggaccaggtcgatttcgaattcaccgaggatcctaccacgttcaacccggacgcgctgacaaagtttgatgggctcatgttcgtcagcaccaccggcgaggagggtgagtcggcgtcccatcgtcgaatttacccatcgacgcccttcctgacgccttgccccattacacttacctctgacaagtcctggacgagacgcaaagcggagcgttccgctcgtacctccagcaaggaggcaactttatcggtgttcacgctgctacggattgtctgaccgggagggagtggtacgtacagaccatcggggcgaggtttgattatcatcccgaactgcaacccgctgtgagtcgttctgctcgctcgctcgcctgacaatggggcaaagggaaaggaagaggcgcgaggtggagtcgtcgattgttttcccgcctcggagagactgacggcatctctctcggacagacattcgtacccctggacaagacacacccgtccatgaccgacatcccggaccgatggtcattcgtgagtcatctttcccgatggaatgtccccaaacggaccgctcatcagcgtgatcgatacagaccgaagaggtgtactacttccgctccgaccctcgggatgtcggcgctcaggtcatcctcaccgtagacgaatcgtcgtataccggcaagtacaccgggtcattcagaaaacctgactcggaactctttggctcaccccgatcctctttctcttttcgcctcccatctatgcaggctcgaacgggtcgacaggcgattacgatcagggcatgccccatcccatcgcttggtaccaggccaccgcaccaggcgctcaacccttgaacgcgtcttccccaggaccaggtcgagccttctatacctcgttggggcacttgagcgagacgtgggcggacccagtcttcatgggccatgtcatgggtggactcaagtgggctttgaatagcgggacgacgaggtggacgaacggcacggctttagtgggtcaggttcaggctaccgaggatgcaagcacagggtcgtcatcggtcggagcgacagcgtcaagctcagggtctgtcatgacgactagcgggacggggacagcgacgtcgacgtcagcggctgatggaacatcgactttggcgccggccaactcgggtcacaaggaaggttcgacggcaggcaaaaaggccgccgtagcgggtgccatcgttggtgccatcggattaatgttgtagatgggacaatcaattgcaaagccgcttccatcagcaagcgtagagagtcggagaatgactcccccgtcgcgtctctgtgcaagaaaagcgccaatatggcccgaccgtcggccatccgatctgaccctcttacttttctttcgtctctcgcgatttgagccactgcggcttctgagtctcgacgtcccgtttggcttcttcgaccgatttcttggcggctgcaatagcgtcgtctagcgtgacgcgagaaaaggatggcatccccttgctcccatcttctttcttttgcatgtcgatacgtaacgtcgtcacgggcttgttgtctgcctttttcacggcacgctccattttctacgttgaaggaggtgcccacaccgtcaaccccgaatcatcctatcgacggcagaacaatgatcgacccacctgcagttggccttccatcatcactcgtgccgcttgagcaagcatccagttcgtgttctccttcttctcttcgcctgaccacgactgtatccggctgtcgttccaggcaatctcgctttcgtccacatccaattgctcgagagggctggtcggagcgatgaggctaccggaacgagggtcctgctctccaaccagcgtattccggcgagctgccggattcaaccagttgacgtaagcctgtgcgacggttcgatggatatcgcctcgaggttcggcgtgaggcgagtcagggtcaggtacgatatgtggcatctccatccagtatccaaagtttcgcctttacggatcgatgaatgccgagcttcagcgaagctcgtagagcagattgcaaagggaatcactcacgtcttttctcctagcccgggtatcatgggctttgcgcatcggcattcgcggggctgccatgcggtgctcctcgtcagtacgcaatcacacgagatctggcggatccgattcggctcacatccgcatcatgcgcattcatcacgaccgatatccgcctctccttgctgtcatcctcgttcaatttgaaagaccactctgatacgtaaagagggaaatagatggggtatgctgcgaactggagacatgcgagaccgcgttcaagaagtcagccgggaagatttcgcatgattctcgcgacgccggactgaccatgatttcattgacatcccgctcgagatccaccttcagatcgcctaacctgacgtgtcttccgacttttcgcttgacatcctccactactttcagaggatccacactgaacggcacggcatccacgttcatcccgaccgattctagctgtttcagatcctgctcggcgtcccagggtaatagatcgtccggaagctcgggctcggtgaaatccaagagcgagatgggcgagaacgagttccctgacaagccagtgctattgaacatgatcaagctcggggactttgatgaaccagccacatcgatgtccgcaagacacgtaaatctccagatcggccagtaaatctgatggccaattttgaaaaggtcggctaaagtttccgctcgaatcgaagtctggcaaggacgtacagctttggtttgctcatgcttcaagttgttgcctcctaatccaaactcatgaaggatcggtgtgacggactctccgaaccaccgcaaggcatatgcgtagatggcattcgggatggtgatctgcgcgatacctcaacgagactgtcagagtgagaagactgggcttcgtccgactagggatggacttgccgttgaaagcaaagcgttttctttcattcgctgctgagccgaggcaggatccagcatgaaaggtactaccgtgatcttttccgatggggtcttgacatcctgaaggattcggctcgtagccgaaagacatcgccggtcaatccgattgcatcttgctagagatcgtgtcgagcgcagtaccgatctgacggatggagcgatcatgattgttgtgatgttcagtgcactgagaaactaactttgggtgagagctatatcatttggcacacatttgggaacggatcgaacgacagtctttggtctttgacctggatcatcattctcgggtcctgcgcgatcggcgcataaagtggaggtcgacctcgagcggctttcgaccagattaagtcgtcatacgttgcaaatggtcaaatgatcatcattctctcttgcacccagacgattcgatctgttagccagatccctacagcttgctcaaatctttctctgcatattcgtgtgcatgtgagatactgccgacgacctaccatcatggatgccgaagtcgtaatcaatcaagtcgatctggtgagccagtatcaaggggtcctgtacgggaatgggctttgaaatgacggtgacatcttatcgcaaaagcatgtagggcttccatcgctccggcaagcgttgactgcggtaattcatgcaagtcaatgagggcatcaaagatttgcttcattctggcaaatggcaactgaagtcgtgcactctgtaggctatcctgtttcagcgcagtctcggtgcgatacagatggtcactgaggaaatcatggaatgccacgtcgtaagccgactcgaaaacaccttgtccaattggtgattgctgatcattacgtgatctcaatcgacaggccatgttatcggatgaccttgtcgcagagtcggtcaacgaaaaggtagaatccttttatcgcaacatcaagacacggcattccgcgtcagacgggtctcttggccagatcgccgtcttattctcccagaagaggtcaaagaagacttggttcagctctacagaggtcagtggtattactgttgcatatttccccatgcaacctgattgatcggactacgatctcaaacgtcgagcaggaacaagtaccgttcgaagtgcacctcatcaccgtctataccccggctacccgtcctcgagcacaggcttcctcggaggaaaagagcagcctttttgaagctatcaccaagatcagcaagtttggtgtggagaattgttcgcacgtcccgggtatctcgtcagccaacgtaagtttctgatgctcagtatcgctcgatgtttgggcgctcatcgctacaaaggggatatgcaaaaaaatattgcgtgatagtcttcgttcccatttccttatgaggtgagtagaggagaagaacttatcctacatcctcgtgagctgagattgatgttgtcccgattggtagatcgtcctggacccacccaacacatctcagcatgtgcgaagcgacatggcagacctaacgataccagcatcatctcgagccagatcagacatctctattccatacgggtcatcacctcgaactaacacgatcacgaccgagagcgaccgacgtgcaagagacctctcgtcgcggtcttcgtccagcaagggagaccgccaggcgcacctctcactctcgcccgcaagagtcgcaagtgcaccttcgagtacagcgacagcactgggttacctcgagcaagccaaaggtggactcatgacggttggtgagaagatgggcggggcggtcggagcggtcggacaatggagcggtgtccggcactaggtatacctggacccatcgcaaaccccagacccggcaccccgtgtgaaaaccgaattgtacaatacgcctccaccgcgtagcttggtttgtactcatcccgaacgatacccctacgaccattcgtcgtcgtcatcatcatctcgttgtctccgaccttgtccaccacgaacgctccgtacgatcttcctccggccggccttgtccctggcggcatcgtcgtcgtcctcttgatcgctctcgtctgatcctgctttacgttgggcgagcttggcttgtaaaagatccacttgaccaggaggcggcaatacgcctgtacacatttcatctgcgtatcagcacgcaatgcgacatgagacactgaaatgcaagaggacgcacctgttcgagctagcctggcctcgagagcttttgtggggaaggaatcggaattacccagatcgtcgaacccgacaaggcttgccatatcaacagatatcagctggacatgctcgctctacctcaccatcggggaccagctcaccggtcgacagcattcccgtccacgaaacatacgacgcagggcagcacctttacgcctagtctcgtcgtcaagaaaggtgcgttctcgacattggcgcgaaggaatagggtgtgtcgatgtttgtccgccagggcctagagtaggagagatcgtgtggcgaggtgtttgtcagtggccgagtcctgtcgggcggtggtgaggtgctcaatctcacatttaaatgtttgtccatgatggcacatcgcgtaaagtcgcgatggaaaaaatgtatcaagcagtaccgctgctttcttcgaagacgatatgtaattatgtaattgaccggacattagcatatatcacaggagtacgacgcagacgaatcacctcagcgactcacgcgctggtagagattagctctttctcattcgtgacctcggtcaatcgcccatgacgatcgtccttggacgcctcattcctcttcacttcggctttgatagcttccaaccgccgttcccgaagtcccttccagtcgaaatcatcctgctctgcagcttcgtccagatcgtcgatcagagacgacgccgagacggatgaagcgtttgacgctcggcgagcggttttggagggtccagctttggggcgactgttgagcaatgacgagcatttagtgggcgtcgaataggccaagctgatcggaagaacttacgactgcataatcgggtattggttatgtttctaactcctttatagttgggccttctgaaggatcatatcagaccgagatctgtatgaggtccaaacgagtctggcgagatgtgtcgaaccgttcctgacatcttttatgcgaattctcggcttctcagttgcatatcaacctggacaagtcaaatggccgaggccgaatgaacccatctcttctcaaggttcttcataccacggtatctgaaatggacagtgaatagacaaagggtgcttgctggagaaaggatctgccacatagctttgatcagtcagttaccaaggtacgcattctctatatgatgttacatcttgcaaacttcgagctcgagctgacattattaccgaccggctccatctgtgatacgtgttcacttgtagaaagcaaaggcttcgacgtcatcagatcagacagactcgacgccctcgaattcttttcggtatggttcggtcgacaatgattttcagggtgacggatggcctgccgttggcggctagtgtggacgacgaatcagtgggtccacgtgtaaaggtgatgactttggaacgagttgattccaccttgctattccaccgacagacagaaaaggatctcgtcgagcagaagcagcagtccaagctactttgcaggcgtatgaccgataggagcgagccggcctgctcgatagagagcgggaaattcacaatacagtaagtagcgagacccaacagcacagctcgccttgtctacgtgatattgaaaccgagtaacctcgtcacagctacctgctcgtcgaccaggtcgtatacctcgccgtgtgcgatgggtcgtatccccgaaagctggcgttttcttacctggacgagctgagcaaggagtttcaaaggagttatgagagccagatcaccagtgcgaaccgaccgtattgcttccgtggctttggtgagtctgggaatagccgtcaaggcggcctctgtcactgggccactgctgatcgtttccgtatcggtgcgtattcatcatccgatagacacctttatctcgaagacgaccaggctctatcaggaccctcatacggctcaggcgtcggcgcccatgtccaatatggacaagctcaacacggacctccaggatgtgacgagaatcatgacgaaaaacatggaggacttgctctggcgtggtgacagcctggaccgtgagtgttgaccgatagtgttcgcccattcgatatttgcctttattgactttgtcgatcggttcaaacggatcgatctaggaatgggccagctgtcgtcttccttgaaaacagagtcggccaagtacaagagagctgcaaggaacatcaacttgcaggcgatgctccgaaaatgggctcctgtcggtggaatcggcctcttcacgatcctctttttatggtggagattcttctgatcaggacctcatacatcaaggaacacgagagaagtcgcattgagattggtcgtctgaacggccttgttgttgtctgtatagctgtggatcattcgcatgtcatgtatggatccgctacgatacccgtagccattgggaggaatctcagcagtgctgagctatcgttcctctggttagcagaaagccaggtcaaagaccgagccgccaaaaagcagtgtcgaagttgatggacagcaagacgtacggtacggcaaaggcctggagttcttgggaatcgaacctgcagtagcgcaacagacagacagcctgagatttccgaggcttgcatgattaatcacatctcggaacctgccgacatcggctatcgtcgtattttggcgggtctcagctgtagggacaggaaggaacatcgtcccgggatgaatgccgcaagacgatttagtgtcctagcttttagcagccctgcataagaaatttgactttccgctgctaaaagcgggcacctgtatggcttccaagtgctgtcccccatctttcaggctcacagctcttgagttcagttgcacagaacttccaacgccgaaaggtatttctgccggtcattgccagtgatatcttcacggtgcggaattgaaagatgagtggctggaaaaccctcggtgcctattgacagccattcatacgataccgtcggcttcctttgtggcttgcggagaattttccagttgttgccgttgataccgtcacacacgatctatcgcttcgtcaatgtcatgccgcagttcgaatcatgacagtccccaattcgaacgacggtcaccatgtgggacacgaattcggttcccaaatttccccgtgattgtctcctctcggtaccgaatatccgaagcgagcgcgggggacttctccttgccgcagtcggccgcaagcgaagattgtgaaacacgtggacccggtcgacacccgccgaaacgccctggcgtgccagcctgttccggtcaacatccctgattccttggctgcaatagccatgattccagggcactgtccctggctgcttctcctttgtcgtcgcgttacaagtggtcatgatcatcaggcgaactttactctccgctcgagacgatccgacgagcacaacggtggctgaaccgtatataggactagataccaacagatctgccgagctgcacgcaacctatcgaaactcaacacgaatgatataagcatcgcgctatcacgattctggcctctgaacccgatcgatatcacaacatttccccaactagcgcgaatcaatacggaatgagtcgcggcactattgcggtagacctggatgacgtcctcgctgcgaccaacgccaaggtagcagagattcacaacgagatgtttggcacggatatgagtctggatgactttgactattgtgagcacggatgggttgcttgctttgtgctacatcgcgtcgaactgctctaagcatgctgacccgtcagatctctggtggaggaacaagtgagcgggaatcacactatggtctgacctacccgatctgacgtagatcacaaagatactggggtgacatctccgagacaatcgagaaggtcaaggtcagttgcctggccatatcacagtcccttgcggaagcgatcgccaacgctaacgcacggtgatgaacaggctatctacgccgccgacctgttcagtcgggtccagccggtcactggagctcaagatggatgcaatagtctgaaaaagctgggctaccggtgagagaaaatgctttgatcagatggccgaccgaagcttcaagctgaagctcgctcaatcacagactgatcatcatcaccgcccggtcagaggatacgagaagggtggagacggaaagatggatagagaggtacttttcgggcgtctttgacgagatttggttctcgggcgaattcgtctctatgcatcgacgcttgagcgattcgaccgaggaggaaaatcggaagcatgcaccagctatcaaatgcggacagacgaaatcggaagtatgtgacatcgtttgacgctgcgatataggtaaaagaaagattgtttgatgacgattccgtctcggctcgcagatcttgagacagaccggagccatgatcctgatcgacgactccttggagcacgcgatcgatctcgctcgtgcggaacccccgctggagaccatcctgtttggaccatacaagtggaatcggagggagtcaaggttgatcacggacgaagacaagctcggatatgagcaaaggatagcacgagggctgaagatggggccagaattcaagctagatacgctaaaaggatatgctaggcgagcgaatgactggagcgaggtagtgcgtttgttgtcaacgtgaactcggccatatctttggctccacaaatcggcgtcctacgacttcgacacatacccataattcattcgacgagactcagagacatctgctcatgaatgtccctgaccgtgctaccagtcatcacggcatactaaggtacgttcacgtcagcttgcgtctatcacggaacaggccgcatcttacctttcctatgagagcttgggttgcgtccctgggagcaacgagaattagccatcgtgaatagaaccggagatccgtgatcgactcgcttgacctcgttgtaactgtgaaggagctcgatatgcgctttgacgatggcatctgcatccttaacgcttcggtcaggcgattgatcagcttaatcaatgcgtaaaccgagaggagcactaacccaattttctcctcgagtgcttggatttcagccttgagtttagtcagtcgttgttcttgggctgcagcgagcgccgacgaggactgtttgggctccggatcagaaagaggtgcagcactgtcctgggacctgtacgcttacgacaggttttttgaacatggtcttgcgcttgatgaatgcggagagaatgaccgaatcgtgtagagcttctagctgatcaaagcttgtaatcggacaagctttagccatccaaatattacagcctgaccagtcgaatgttgatgacccggtgagtgaaacacgcgcggacattcctcatgatttccaatgtccgccgaaataataattatgtttgtgagccagagcgaccacagggtagatatttcgaaagttgcaactgttccaaactcattatggctcgtcgacggatagcatccttgcttgcaactagacatagcttaatccatagctcctgcccagatagttcaatcagatggcacctcccgtaaaaaactcgaacaagcggaatccgaacgcgccgaatggagctgcaaaggtttgtccacttggcttgcttctcggcaacttccgatggaacttctgttgacaaggcgattactttcgtaaaacataggccagaccaagctcgaagaggaccaaagaaatcaatcctcttagcggaaagcccgctcggcgccctgatcagccgaagaaggtcaagctccgcgaccaaaaattcattccggttccagagtctgcgttcttgggcagcaagggcaaaggcaaagcccgcgccaccgatgatcagggtgactctggggaggactctgcagggagtgagggtgatgatgatgatgacgaggacgacgacctcggcatgatggtggatggggaagacgacgaagctatggagtacatcaaggctggaggcgccagcttcctgacaggccttgatgcgaagacgatcagcaggtcagttgatatcaagctatgataaagtcgtggcaagactgactgaattcaaacgtcatatgaaacaggtcaaagaaggagacggagaggcttcacgagctagacaagacgaaagagcctctacccaaacagtccaaacgcaaagcggcttcgccctcgttctcggacctcagcgatgccgagctggacacggactttgattccgagctggattccgaccttgatgacgacgaagaccttgatcttgacgattcagatctcgatgacaaagtcaaccaggagtacgaggaggaggagaagaagcgggtccgcaaaaaggccaaggtggccgaggccgacgatctggaagagtcttatgcagccctaggtaggaagcggaaagagaagcagcaagaggccggagaggaggacaaggagcacgctgaggttggacatcttcccatcaaactcgccaatggcgaaattgagcagctgccgggaaagacgcggatagcaatcccgtcaggtccccctgacaagaagaagaagaaacaggaagaatcggatgtcgagaccgagtttacggagtctgaagcgtcagaggacgaagaagatctcgtcgagaggatcgccaacgcccgaggaaagtttggtcgaatgggaatttctgaaatcctgacctcggatctcgccggagttcagtggaaagagcggacgaataggaggctcgctatggccaaggaacaaatcgccaaaatcggtgccgagatcatgagtggaggagaattgatggacatggtaagcccaggtctgtgacctctgatctacatctaggctaaatacgggtttcatcatgttcaggtgccccttttggcgagaatgtcgaccttctcgctagagaaagtcaaatctggcgacgagtacaacaccgtcctgccggtacctaactcgatccgaggtttagccttcttgtcgcaattggcggtttacaaggatctgattccaggtaagtcggtcgaagccctggctgcactggaacggtcaaattgaacatgattacattcaggctaccggatacgtgagctcaccgcgctcgaagaatctgagaaggttcgagacgaggtccgacgattgcgagagggagagaagggtctcgtcaaaagctacaagctctatctcaaaacactggagacagaaattaaacgtgagctgtcacgaggatactgctatgcgtcgcccagcgctgactttggccatcattactatgcaggcaaatcgtctttggcatctgtcagcttgaagtgtatgtgtgacctgctgtcatcgctgccccacttcaactttgccgaaaacatcatgggagtcattgtcggtcgtctcagcaagagaacatgggatagtgtaagtagactttcagaatacagccgatctcgctgctgtaattgatggtggtttgatggattcaggactcggaattgtgcctccgaactgtcgtcaaggtcttccgtgacgatgtgaccgcacattacagtgcagtccttctccgcctgatcgctcgaatgatcaaggaacgccgcttcaaggttcaccccaatgtgctgagctgtctcttggcgctgagattgcggtcagaattgagcagtccccacgaggccaagagcaaggccaggtatcacgacaagaagccggacgatgccaaggtcaagagcgaggttcgaaagaagtggatgaacaagaaccgaagaaaggccgagaaggagcgccaggaagtcgagaaggagctgcaagaagcctctgctgaagttgatcaggaggagaggtccaaagtggtgcgttttacttgccccgttcatcttcactcctgtctaatcgctgatgcatcgttatactttgtagcaaaccgagacgctcaagaacctcttcgtgttgtacttttccatcttgaagcagcctaagcggtcacctttgcttccagctgcgatggagggtattgccaaatttgcccatcttgtgaacatcgaattctttcgagacttgctcaaggtgttgaaaaacatcatcaagggagacggaagcatggatgacgaggacgaggaagaatttgttggccccgacgttgtcggcaagggtattgagacgcgattgcgtatgttggccatcgtaacggcctttgagctcttgtcgggtcaaggtgagtcttatcatcgaaatcttcattccgatcaccactaacgttacgttcgcacgcaggtgaggctttgacactcgacctgggcgagttcatcgtgcagctgtatgcgttactgcatcccttgtgcgtcgacaccaacattgagcacgtacccatcgccaagggtatcccgatcgcccaaaagccctcggcaaccccgattgacaacaagaagaagaagggtcccaccgacaggtcgtcgactgcggatctgctcttccgatgtctgcacctcgtcttcttctctcgtcacgcccacacggccaactctccaccttggcgagccgcagcgtttgcaaagagattgctggaatgctcgctgcacttccctgcggcgacttccaagcgagcgatcgactttgtcaagatgctcgttggcaaagagcccaagttggaagccatgctggcgactgaagaccgtacggcagatggggtctatcgatacgacctggacgacccgcagctgtccaacccgttcgcaggtagcttctgggagctgggtctgctagagcgtgatcactgggatgaggatatccgaaagcacgcagggctgctggccaacggaagattgggttagatttcgggcattgtagatggcgggtcgtgttgtaccaagcgagatgtccatcatgcgtatttttgtatcggatacattctgcgagacatcgagttgtacgaagtcacggaacaatcggcatctctagaacggaagactgaaagcagggtattatgaggctctgactattgctctttcttggactgcgatacgccggccgttttggacaccgccataaggtaaggcggtacctgtaacaaagaaaaagggaaacgaccgcggggtctatcagcagaatacacttgcaacatccagatgtcttgactcacctggatactcgaaagggcagcgattcccatagcgaccagagggataaagaccaagaacgagaccaacagacccgtgatcaaaggttcggtaaagtacctctcgggctcgaacacgggggtgtcggtgtcgttgccatgggtcgagttgtgcttgtggctgggacgacggtgactgccgttcttggctttgtggtgaccgtgtccgtgttccttggcgaaagctgggacctgggtcgtggcggtgacgatggcaggttggtcctgctcgccatcatcgtcaccgtcggcatgctcgagcggcttggaagtatccaagacgtcctcctcgatcttcgctacgtcttcatccctgtcatcggcgactccagggaagagttcttcgaggtattcctcggcctgatcggcgaaatctccgccgatctccttcaggtcgtcgtacacgttcgcagcggcatctttgagggattctgcggtaggctccaacaattgtcgagctatagacaaggcccgtgatcagtatctacgtcgcctaaaaatcgattgtggtcagaagccacttaccttcacgttctgatctgctggccaattgccgggcgtttgcatcatgggtagcactgtatatatagggagaggcgtcagttcccgtgttatgggccgaatgatgctcgcaacttgactcacgcttgctgtgccaatgcctgaccggcgaatagcagaatcgacacgctagataccaattgagcgatcctcatctttatgtatgcgggtctgagtgtgggtttgcggatggatatcgatgagatctacgatatcaaaggcaacctcgaaatcatcatcccgatgatgatgatgatggtgatgagccagggttgtgaacctgacaattttcctcaaaagtttgagcctgaaacttaaaattccctcgatgacaatcgcccgatggcttactgctaactgctgacctgccagttgggtctttgacatcttttgttgcttgagatcaaattgccagtgccgctctgcgccctgtgacagcgatggatttcagcataaatacctctcatggttacagtgcgatcagctttcgtaaatggcggagccatcgttcctattcgctggtccagtgactccagacgcacacagcaacacttgaccaggacgttcgcgactctcaagcgagagccgttgagtccgtcacctaaattccgggctaggtctttcagagtccgaccaagggatgcggaaacggttctctattagaaagtgctcgaagctactgtaagcgaatcaccctaaccagctgcagtatcgcaaacgagactaataagatgcctgacgaatccacttttcagtactctcgaaaatcgagcctcttgaggtgggcgagcaagaaaatcgggggatcttacgacaacgagttgaacaagcgaggatatgctggaaaaagcctcgatagagtccttttcaaggctgtaagtgcattcatgttgaggaaacccttgccatctgctgacaatcgctgccggctcctctgcgcatcatgcagtattactggccagtctggaagttctcgtgtttcgtcgagacacggtcagagaactctgagacggcaatcaaagccattattgacatgccggaccatatcattccaggtccgtccagtgtagcaaccccttgcagggctgtcttcgaccgcgatttgctcatccgacccgcctgttgctcccgaccatctctcgcataatgaatcaggcagccatgtctcgcccctctccctactacctctcggcgacgcgccgttcgacgccgaatttctcaaaccttatgacccgaaggtccacctccctcatagtattcctataagtgccatcccgttctcgatctcgccgttcgacgtgatcgagttggcgaggaactcggctccgcccagggtgaggttgactacaggtcatggcggtggaaacgaatttcggatcagtgccaagcacgacatcagggagctcatcgtgagttgacgcatttcaccgcggatcgcgtgtcgcgtgcgcctgtaaagctgacacgtcagtcgataggtagcagcgtatccggtgtaccacccgatattcgtcgctgagtacgactttgtgcttcgagataatctaccggtgcgacggattgccttggctatggatgcatacgaacccaatgtgagaggactgcacttttttgccctacgaatagccgtattgacatagacggcgttgtagatcgacgacgcaaaggtattcatacccaacctttacgatgattcttggcgcaggtgggttggcgatctcgctatcttcttgatcagatgagcctgacacgacgatccatcagcaagaacaaaggctattgggccaatcgggatgataatcgaacgaacctcgacgatgtcgccgagtccttctttcagggttttcacgcagagaccttgtccatctggttgaatccaccggcaggaccgcgaacgacgccaatgaagggccaagatcgcaggactatcgcgctggcgccgcctgtatctccactggatgccatcaagatgaacgaatcctcaatcccgtgggacgacgtcagggttcaggaatacggcagtcaggatttccttgcgaatcgagcttgggttcgcttgaacaccgaaaagtttgtcatggacgtggcagtgaatgtgagttccatctcggaagccgagaaagtacccctctgagattcatcccgtgaatatcagaaatataaaggcgaggctttggccaaggctttaaggacgagggacaagaaacacttgcaggatctcgaaatggacccgttctacaagtacttgacgaacaatgcagaggagatgactcagtagtggcaaagggccaaaccggcctggctaaaacagccaggcagtctggggaaacggaggatcaaacccgatccagcgggcagattcgccagatgagcatggttgtgtaccaaggcgcacgttttcatattatgcatagcatttcgcattttcgccactttgtgtcatccctgaagctgaccgtccgaaagccaaatggccgccccggcaagagactgccggcctggccatggcagcaggcgttgcctagatttgtgccacaacttggccatcagcccgttgatccgagcctccggcccagacccgagccccgctaggatccagaacttgttggatgatctgggagagccaacgtgtcattaacacccaacccagcccgatcgtatttacggcgtccgatcaactcacctgacctctacccgcaatcgccctagagaagccttgcgctcgtcgcgcgtcatgacccatctctgtgccacttataattcagacatgaaactggctgtccaagactgatgagactcacggcgcaatttattgaagacctcgtctgaaacgccctcttcaatgtatacctcggagttgacctctcctgcacttttgccactcttctccgcatcttcactatccgccgagggcaagccagcagagatacagaatctgggcgcatcaagcgcggcttgcggagtcatcccccgaaggatattcagcagcacttggacgtgaccttgaggttgcatgaaaccgctgcaataaatcccgaccatcagctcgcaacccaacagggaaattgaccgaagaatagacttgccccatgactccgtacgataggaacagctcgtctcctttggtagccatggcgggaactgctcaagctaacaggtcagtaggtagtcatttgatatgaccgagatcgtgcttcgaatcgcttactgatagtatggtacggccgctttccgccttgaacattgttaggatgaccttcctctaacatgaatcctgaacctctgttctgaagggtgaatccgcagtccttcggcacagctcctgttccgaaacctgcaatgtttgacaggtaagcaaagtgctgtctccggcgacaaggacgtaaattcgtaccagcgtaattgctgacagtcgggagatgagctttagtggaaatcactacagtgagccaccgcctgcttgttttgggcttaccttgcaatgaatgagcatgcattgccatccttgtcggaagctgtatgaggtgcccaatgtcagcctggcaacaagacgtacagccgcggtgtcgaatttaccagtaaagtaaacagtatcggatgattgtacaggagagccctgagtcaccagaccgaatttcagtcgggtcagcacccgatcctgtgcgacccgcgaaatgcgcacataccttgcggacatcgacggtcgatttctccaggtcaatcagagcggctcgcttgtcgaggtacgcctgtggtgtactttctgatcaacggttttttccttggtacgttcgagaaccttatgtaccttgctcaacatttccttgacggggacatgcacgacctcgggatccgcaatatagtagcgtgtgtctattcataaagcagatttcagggtcgctgggaggtaagacagaagttatagctaagctcaccggcaaaggctaatctcagcgattcgatcaagatatgcagatattcgaccgagttgtgttccagcttgagaatgtcgtccagcttgccggacgattcgaggccctcaatgataccgagagcgactagagccgttagaccttgaccattgggtggacactggtgaggaaacgctttcagggctggccgtatatttaaacgaggtggtggtcagactcacctcgtacagggtcacgccttcttctccagctttgccctgcttgaatttgtacttgatgggctcaaccacggtcgcagtgtgagacgcaagatcttccatggtcatcactccgcctcccgactgaacgagctcgacgatagcttcggcgatcctgcccgtgtagaaacccttggtcccctgctcggcgatggctttgaaggtattggccagatgggggaacttgacgatatgagaagctaggggagccttgccattcaagagcatgtcatgggcgttgggagaagccttcttgatgagattctcgctaccttgccaggcgttggcgtgtagctcagccgtggggactccatcttctgccaacctgatcgcagggctcaagatctcgctcatgctcagcttgccactcccaaactcctcgaccgttttgacccaaccactcgcagctccgggaacagtaacactgttcaagttcgtgagtgggatggtcttgccagtaattccttgcgaccggaggtgctcgagggtcaaagcagcgggagctcggcctgaagcgttgatggcgcgaacggtcttggttttggcatcccaaaagaggcagaacaggtcgcctcccacaccagtacaagagggttcggtgacgttcagagccgcagctgcaagtattgagacatcgtcagcagggtaatcgctggtcacttgcgtttcgatctcgtaccggtagcgacagcggcatccgctgctcgaacagaaagacgtcagattgagctcgacacagagagcttgctcagcatattttactgaccagcatttcctcccttgttgagaatctctagaccggcttgactggctagggcttgactactagcaaccaggcctttcgtgctaaaaacggtcgaacgtcgagacgggaagtgcgagaactgcgggttgtttgaaggatgaacgacgttccaatctatagcgaccatcttaaagagatcggttcctcgtgtttggggtacggacgagaacaaagttgcctgcttgaattgcaaggatggcaaggtaaagttatatcaatccagatccccagtagtaaaccaggtccggctcgatctgtatcatcgggtattccgtcaacactcgagggtaccgctcgctcatcggccgaacccgaccgagtatcggatttgaccgaatcgatggcacgggaacaaggtcgaaatcgaatgaaaagtaaggacatacagaggcacaagcaaagtactggccttatctacagagccgaatcgtctacctacactgcagtagattatgaatgattatgacggtattgtccgtcatttccctctctctgctcgtccatcggttgcatttgatactgccccgagaaaggcggctgcgcatggtatccttgaggcatcggtcccggcataccgtacgcgtatgaattgttgaggggcatcggagccatccccattgcaggcatcccaaacatggaccccatcgtcgggctcataggagcaccgaaagggggtatcatgggcatgccaaacggagggcccatcatcggccccccgtacatatagggactgcctcccggcataccgggcatacccggtgacaggtcgggcgataagagcgtcttatactcgtcattgggtcgcgctggaattggtggcggggcgtgcaagttgtcgctagcacttgcgtagctttgttcgtgttggctggagcttcctgcacgcgtagcactcccactaccctcggccaagctcgactgacccatcgcgttgacggcctcttcgtaacgccgacgcatgatatccttttcttcagtggccgacgcccaccgggaatggccctgcgaagagccagagccagaaatttccgcagccccgaactcggcgcgggttggtgtggcgctgttcgagcttccatgaccgtgtccactttcagaccatcccgaatcgctgcgcttggactggtggtgattcgagacctgccgtgtggcttgctcgtatcgtcgtttcatcgtgtctttttcctctgaagcactcataaagcgaggacttgggtcgaatggcgcgggcttggaactaccagcgtgcgaggcagaggaactgccttcagcttgatctggcatgcgactgcttgatccggcttgagcttggctcatgcgatcttgagcttcatagaaccgtcgcatcgcttccttgtcgctgagaggcttcatggaggatccggacgactctgcttgggatggacggccaggatcgtcctgggcttgatagaaagcaggaggcatagcctgggattgcgcgatcctatcctgtgctgcgtaataccgtttcatttgctccttgtcgctcaaaggctgaggtaagtgccgtgacgatgatggactcgtcgcgaccagagcgtccggtactggaatagacgggacatcgccgttgattcccaatcccacaaacgcattcgatggagggtccgatactgcttgccgggatgtcgcaagaggcgatgcgcgtgacagcgttccgggtatctcttcaagtggcgtagcaaggggctgatcgacagcttggttacgaacctgctgagaatcagtttcgtcttgtctggctataggcatcttctctctggggtatgacgtgtccccctcatggtccagttcggctggtggatctaccactaccctcggatgtcccgattgacggggactgtactcgggaggcggttcatgagggacgtcctgagccatgcccattggctctaaatcggcgcctccagatagctgcgtcatggcagcgttccttcttgcctctatgtataacctcgatttctcagcctcggcggcatgccatcggttttgattcgtcaccgggctatcttgagatactcgaggggtttgctgaacttcgccgttctcgttcaaaacgactctaccgccatcttgatgtatgtaagaacgacggcttggtgttggactaatcccgggtctttcgaggaggcgagagttctgacgtcaccaagttcgtcatcagtgattcgatagtcgtgtgtcaaaattgaagagaaccgcgactcacgggtcgtgcatccatgctgcgacggccttcctcgctgacgagtgtcacgccggtcggggtccgcgaaggcccagcgggtctcaaacccatgccgggcgaaccgttcatggatggacctcggtccattccctgtcctgacgaccaggacattcgttttgtatccatcaacacgttgggtgcttgttctgtcattccgaaagtttgcggacgggctctggcgaaattgtgaccggcgtccgattgcatatcccgcacagaggacacgtccgactgtgattgccattggggatgcgagtagatggacgaagagtccaccgagagcggtcggggagcgaatggctgggcagacagacgagcttgattgggcatttcctgagcaatggacggattcattggcccgtaatagctgtttcgagcaggacggccgggatggcctggagagagctgattggcggggttgatccgaggttccgggaacgctgtaggttcgggcggaggtcgcgtgccaacaggaccagcaaatgagcttctgatcgaggtcgtttggctgtctgttcgggccaccccgggccgaccgttcgggtaagggcagagcgcgtcgaccattccgatctgattgaccacgtcgtgtgctctgggtcttccatagatccccagggtgacctgtaggtgttcgagcttgacatcccccatgccttccatgatcgccttgacggacaactcgtacgcaatgtcgaacagcttggcgccttttgtcgtatgggctaccagaccagccgggaccaccagggcgatcgaccgcttcttctcttctgtccgtccgattttttctccgaccggaacctttgcttcatgaaccactcttgttcgattggacgatacttgttttgcaccacggctgaccggaggtcggaaggtgatcacttcgatcagttccaagtgaaacgcacgaagtttgagcggtttctgtctcgatgatctcagacaagccatgacttcgatccgatcggccggaccgaacgcagagtaattacgcatgaccgtcatttccatctcctcgaacactgtcgatctcgtttcaggcacgttgtagatgggccacgccgagtgttgctcatgcttggtaatgaagacggcttgttgtgcgcgtgagaccggattcgaatctcgccgcagtagaccactggcgacccaaggtcaatcgacatcggtcggtagccgcaggaagagcgaggacacttaccttttaggtttatgggacaggttcgcgaccagttcatatcggatcccgccgcctttaggtctcatctcgacggttccagggatattcagaggcagaggaatgtagaactgaggcgggacggacttccattcagattgatcgcggcagtcgggaagccccacagcatgctcaccttgaaatccgtctacagtacccatttggtatatttcaagtcagcaacgaggtccatttcgtggtgtagaccgacttgccgcctggatcgagtcccactccttccctgctggcgcctgccataccgtcacaggtgcgcctacaacacaaatcgcgttttggcctgtaacaggatcagagcggtcccaagggtctctatcaacctcatcgtaccgcaaagagaccaagctcggatacatacctcctccgggcatcgtttcgatccgtacgaattcgacctggatcgacctcgctttgaccccggaggatcccggtcgaaattcaagaagctgcgatggtgcaaatacaaagaagcggacttgagcgacaattataggacgacctcggacgattcggtcgtcacttacaccatggaccgctggtggctttctccatggctcttgacccagaatccccggccatcctaatgaccggtatcgaaaggtaaatatgtactcgttccgtttcaaaacgacgaccgacgacaaacggaccttgtaagaacggcacgttgggcagggtctgaaagttcctgagcgcgagaaaacgcaggtcatacgttttgagaatttgcctacagtcttcaagcatcctccagtgcggccatcttacattttcacgccgttcgacatgtcgactaaaatgccaccgtctgcttgtttacacttgatcgaggtccgattcgtttccttgtagtcgggtgtgacctccacacagctattactagcaagacatgacgagatcgtgctgtgcctttgacttgatcctaactaatttcagacttgtattccagaccgatctgaaaagagtcgatgaagcgattgcatggacgatggatcgagggatgaatatgacctaccctttggaggatggtggatggccatgggtggatatgccgtcatcgcgcgagagagagagttcaaggaagatccatgtcgatgcccatattcattggcgtcgtgtatcacgtgactttcttgtagaggtcgcgaccccctgggctcgatactttggaagcaacgcaaagagtggagaggttactcgcagaacaagagtcatgtacatgatcgatgcgacaagacacacgcaccgtccatccaaagccaaggggtctcgtcgtcgaaggagtatcgcctgatcaaatctcgccgtcacggatccacatgcttttcgctggacggtagctcccgcctaaagacttcacggctcgacacccatacaactaggatctccctgaaaggttcacgcccagctcacccaaaatggccgacaaggaggccgtcaggctcgcagagtacatcgtccgggcggactttgggagcgttgtagcatccgtcgcttcgatcctcttgcataggggtcgaatgcggttgaacgagattgtgcatttcaccaaactacctcgtcgttcggtagccggagtcctcatcaccttgatacaacacaacctggcttggcactgcgagacagaactgggacagaggacgcaggagtactttgagatgaatctgaaggaatgtctgatgaggttgcgatggggtaggatcctggagttgactcaggaaaacttgggagcagacgtaagctgatcgactgggcagtacgacgtctcacgctaaagctagtgtcccgctcgacgtctttgtgaatgcaggctcgtaaaatcgttcaagtcatccttcaaggaggaaaactacggctgcctcacatcctgcagaacatggacctagaatccatagatagcccctcgaagcgggaagtccgtgagtcgagattcccaaagcaagacccgaggatctacgtactgtactgactcgcaagacttgttgcaggcaaacaacaactcaccgaaatcgtctacaaactcatcatcaaccggttgatccagcctacgactcctatcctgcatcgaacaccctacgacgagatgctcaagaagcgaaaagccaaggagaaatcacgatctgccttgctctccgtcaaagagctggcacagatcaaatcggacgtgatgggagagatgcgggacttggtcaaggaggaaacgagcgcggacaaggcgttgttaaaggcaggaatgaagaggaaagccgatcctggaatgggggggtcgagcaaaaaggtacgtgacatagtctctagtcaggattgccgccaaggctcatctcgacatccttgattcccgataggtcaagggagacgagctagaaatggtcgatgtgagtatccttcacaggtctcatcaaaatctctgccaacgcagtgtctcctcacccttagcctaaagccatgttacgaataaattacgagcgtttcgattgcctgttcagaaacaaggcaagtgattcttgcggctggtacctgaaggcaagcggcactgaacgacttgcgtccgtctcctagttgatagagttggcggttgcggatcgatacaacaaggccgctggattcattgtcaagggtctgatgagcctcattccggccgagggcgattcattgctgctagagacctcgggtacggacttcagcgatcgtcaagttcgggatgccgtatcttggctaatctttgccattttcttgtcgctagcgaccggtggaatgcaggccgtgctgacccgtctggaggagcacgaacgagactcgctgtctttgggattcggagggaaatccctgacctccaagtcaaagattcacgagctcctggctggatatgccgccatcttggcaggcgaggatgatcagaacgcctatcgagcagaaggtgtctttctcgggcgagatatgatggccgcctcggcgagcggaccccagtacatggtgctattcgagcgtatctgcagccgactgaaacggcagctgttggagagtttcgtcgaggagacgcaaggtcccctagggaggagggtcttcaatgccgtcatgcacggcgacaaagtgacggaagagatggtgagtccttccatgtccatccgttcgttgcgatccctgagtctcccatttccactcgcaggtcgtttcgaaagcgctcatcaagggagacgaggctcggataaagctgagcgcactcaagaccgcctccctagtcactttccaggccatctcgcgaggagccgaccggtcggtatctcgttgcacctttctctactatgtggatctctcccgagcgtatcagaccatcctcagtcggatgtacaagtcgctggccaacattcaccagagaaaggaaatgatctaccaagaaaacgcttatgtttacgagatcagtatgagggaggacgtcatcgagaaccccaaattgatgcacgaacgagagagggctaccctggccaagatggagaaggaattggacaagctcaacacggcgcagacgaggatggagatgaacgtgttcgtccttcgggatctgcccggtggaccgctttccgtccggtaagtgcagtcagtgacctgagcttcgaccgctcgatcactgatggaattcctgtcgatctcagtttggatgacccctttgtccggtaacaccggtacgtgtaccgaagggagatgtatagaacactttacgaacacgatcattatgccatgtcaacgattccgtttcaatctggcgcgtatcggtcaagtccgctcttgtcggacggcctgtttcatgagcaattccgcgatgtaagggaggtttacgtgccgtgcaaatcgcagccgaatgccatagacctgtctgagaaacgagctctggcacgtcttcaagtcttgtcgaccagcgttggcacgccgagtgtccgttcacatccgataccgagtatctggtgagagaaaggaaagtgttatctcgggaatcaaaggatctttttgcttccgctccgattcggaactcgcgccgatgatatcggtccaggtagcagctcgaacagttgctcgcaacgagccacaagtatatatattatcatcccgaacacatacccgcacgagcacagctgatgtcgtcgggatagtgctcggttcttacactacaatcttcttgcaaccttgctcaacacctcaagctagtccctagtcacgcaacgaaaatgtcctcctcagaacccggttacctcagtgccgctcgatacggcaaggacctcgtcagggtcgcccgagtggtcagagaaggcaacgtccaccatgtagtcggtgagtcgatccgatccgcattctccggatttctttcctgatgtgtgaaagtggaaacttgtgcagaatacactgtccgagtgatgctggagggtcagattgagaccagctacacaaaggccgacaacaagtgtgtagtgacgacggacagcatgaagaacacggtcaacggtgagattttcgtgagaattgttcacagaggattacgactaacttcttcgtcatatgataaagtctttgccaagacttctccccacgtcttgacgccagagctgttcgctttgcacttggctctacactacgtttcgcatcacgaccatatcaacaaggcgttcatcgacatcctgtcgcacaagtggtcgaggattcctgtccagggaaagcctcacggatgggctttcacgagagatggagaggaaaaggccgtcatcgctgtggtggccgacgcgacccaaggcaagcaaaatgtcaaggcgaccgtcaactctggaatgaaggatcttcttggtgagctgcacagccttgcgtttgaccctgggcttcgagcttacgtcttcatgtggttcatatggttcatgcggatctaaagtacttaaaactgctggatcgagtttcgaagacttttacaaggacgaatttacaaccctagcaggtacgtacaggcgagcgggacatgtgtggtgtctgtacgggaattgaccatgggcctgcgtcgctactgcagaggtcgccgacagactcttttccacttccgtcaccctcgactacaccgtcccccttccctcttcgattccactcacgatcgcaaacatcccggagatcggaaagaagctcgactttcctcgaatcttccgcactgccaaagaggtcacgctggaagtattcgccacggatgaatcggccagtgtccaggctaccatgtacaacactgctcaaaagttgctgagggatgccaaggagattgagcgaattagctacagctaccccaacaagcactacatgtgagtgatggcagcagccatcgggccctggttcagactccacgaagctgattctttcgctgcgcaccagtcctgtcaacctcgcgccctttggtctcgacaatggtctaggacgagaaggtggtgccgaggtcttccatccggctgccgatccctcagggctgatcacggccagcgtgacgaggaagagtgcagggggttcgccactgaaagccaacctctaggattcggctgcacatcgggatcgacttgtaaacagatagatttctcgaacttgtatgatattcgtgacactatgaacctcggtatattttgacatgctcggctttgacagtttccgtgtgtgaccttgtggcagattttgagaggatcgtacaatcgcgggcgtctgttctacatacgcaagcctggctccgcaggctttccgagcccttgcggcgtctttctagcatactttcatgctctcggcggtccagcgaaggaacgaaaagggtgaggagagaggtacgaaagtggagaggaatatggaacaagggaacggggagggttttggagctgaagaacatacttttacctttttctcgaatggcaagacgttcgtttcgaccagagtcatgacgcaatcataccttgaccttcttttccgcctgtcatcacgatcacgtacggatttcagctacgaacagacgatgagacggattatggttcatgcacttacgggctcttcagtctcctggacctctacaccttcatccaactttcgcttctctccaccggtctctccctccccatttgtggattccggcgcagaagacgcggttttgaatcgatcttctcgggctttacgtcttcgttcttcctcgacctgctcggctgtcttttctactggtctatcaaaggtgagagcagggccggttgatcagctgggtacagatcggaaccgctcgaattgaggtactcacgcagcggtctgagcttgaggagcggtctcggtcttggtctcttctggtcccgagacggcagccttgacggcttcagtcttttccacgagcttgcccttgaccttttgcatcgcaccgggtttctcgacaaccccccacttggcccgtcgtttcgccaaagcctcttcggattccgccaacgaggcagccgacggagccggggtcgaagcgggggtagcgacggcctttttcttctcctcaccggcgttggaagcctttttgctctccggcttcgaggtggacgccggggtagctttaggcgcggacgctgcgggctcgacgaaggggatcccaaacttggccgcgcgggcccgtcgtttctcgagttcgatctctgccgggctcttttccgcgccgacgccgagttcgacgagggtcgtaggtggggccgccttgtcagatgtcaggtcgacttcggtcgtcttgccatcttcgttggggatagaggtcatggtggtctcggacgtctgctcgcccggtacggaactatcgtcatgagcgttcgacatcagcgatacgttttttttctcgctcggtcgacgcatatacgatcgatcatctcgacgactcacggagcagggacctcggcgcccttgtcggcttctcgggtgatggtcacgccggccacctggggtacgccagtctcggcctcgatcaaccgatcgacgagttccgcctttttccccgtgacgggaagacccttttcggtcaacatcgccttgagttccactacggtgtgcttgttactgatgacgacggtatcgagtcgaggtcagcgacggtcgtctgtttgtagatgcggtgttgaggcacgttcttacagttcttcggatagtgccatgatgaccgtgttctgtcgctggatggattggtgcgaggtgcggtctttggatggttcgacctggagactacttgttgatcggggcttccatagccatctcgatgagaatgtgtgtgagaatgtaaaagacggagtatagaggatgaggttgccaggagcagctgctggagcttgcggggggtgagttgggtgaatatcacgtgattcacccttttcccatggttagacaagatcgaatgacgtaacgtcgagtcgaacagcgaacagacaacgaccaacttgcaactcggtgatcggtgatgcagtagatacagaatagcacgtacgtagtacccagtcatatttattgagccaaacatcaactgccaagaacaggattttggactcgcaacgacattgtctttctcctgcgcctactcgactgaacagcgatttagcagacctaagagccaggtaccgagcgggtcacgcggtcctccccatcgcgatgcctctacttccgatcctcaaatcggccatggtcgcgactgccaatggcctgaccctactagccatctgtccacctcacatcgcttcggccgaggaaggcgatcggatgatggaagacgtcacttcgcccgaaaggttgctagcgaccgaccggaccccctgggtggaaaggctcgtcgtgttcggcatgaccgcatacgagatctggagcctccgacggggaaacggcaagatcgacagctcgtccgctctgataggagaactgggcgtcttgctcgcgatcgcgggtgccctcctccggttgaggtgttatcaagtgttgggccgattcttcacattcaaggtgagtgacacacctcgggctctgaccttgcacagcccgctagacgggttggtgatcacccataaacgtcgacgcaggtcgccatccggaaacaacatcgtctgatcaccggtccattcccttacgacgtgttccgacacccatcttacaccggtttgaccctcatgagcatcgggatcgtcctccgatgcgccacctctgctagcgccctgcactatcttcatctctatcgactcggctctcgtatcgcccgaccgatcgccctctccctgagctcggctttggggatcattttgtcgagtagcaccgtccaggctgtagggactggaggattcggcctagcgttattggcaggacagatgaggatcctgaacgctcgagttcgggtagaggaaaaggccctgagggaagagtttgggcacgaatacgatcggtattctagaaagacctggaagttcttgccaggttggtaatgcgaagcgatgatatcgttcaatacggaacgtcatcatcagcgaccaggacaaaggaacctcggttcaagtggaggcgaacattatgccataccggtcgtcaaggcaggtcggtgctgcaatgcgctcatccggtctcccggctgccttgcattctcagagtaccttcctttcatgctatatgagagggcgaaagattgggaccacacctcgaagtatgataaatagcatcgattaataatggtcgacatgccctgtacactatttgcgtatctcgttcgcaactaaacggagcaccaaacggccggcatattttcacagaatatcaccatgtctagagaccaagctgacttttacacagcagcaacgactcaatccaaggatcaggacaaggtcgactccgacttggacttggcagtgtccccgcaggaggacgatgcatggcgcaaagcgatatcagaattcaaagcggtgaagcgtctgcctgcggaagaacaacacctccacaagagacgtctggagttggacgatttggaaaggagagcgctaggtcttcgacctgtccaccgcaatgccagacagaaaagaggacgagtcggtgggcctgaacccttgtggaggggccaggaagaaggtccggaggctacatacccagtcctcgacgggtatcccagggaccgaaactcgagattttgccttcacaagagagcctggatcgaaatctagcgagcccggcctaaccgaacaggagaagatgcggaaagctgctgattgggacttcgagaaggagcaggatgaatgccgagaagcgttgactgcaaccgactccagctgcaacacatcgttcaatcgggatggcagcaccaaaccacaaacccacaacggcgatggaagtgcacaggacaatatggacctttattctaaagattgaacgattgtcgccattacgaagtttccgttccggctgacttgatgatgagcatataagtcagttttacggaaggcagttgacaccgagacctcaagtgtagagttctttgtgataccgcgcaacatttccacatggggtgtaataaaagtctaccactacaactgcgctcttcctgtgcgtcaagcacagcctcgtcatgtcttgaacacaatgatgagcaagagcaagatgacgatcaacgcgacgatcgtgatcgagctcactatcgaccatgaaccctgatcagctcgagatttgatcgcatttcaaaaccgctcaaacgaaccgtgctctctgctccccttggccaccttgtccaggcttcttcccgctcttgacattcgcgccgccgtgccgtccatcctcgcgtcggtatcatccagcagctcgttttgcaaatccaattcgtctccaatctgtaacgacatgtggtgatggcgattgatcgagtgcgacaagaggtctaatcgtgcgtcctggtctgtcgatccggagccgtctcatcagtctcaacggacactgtactgcaatacgagacgaggcgagatggtactgaccgtccataacacctctctgatcctgcagaatctgctgctcgctcaacatctctctcccttcatcttcggcctcgtccgggtcgtaactccctcttctccctttatagctctctgggttgaaaaggggatcccgctcggccggtatcgtccccgagggatgcaccaccagatcatcatcgtcctcgttctctccgtatccgtcgacgtcgtccctgtagcttccttggcttgactgcgctcgccaagggatatctgaggggaacgaggtcatggccggcgttggtggcagaacttgcagatcggggacgagtcgggcggtcgatgacgaagaagcgtcgttcgagtcggcggtatcttccatcgagatgataggactgaacgacacgagggagtcaacgctcgagtcctctgcaagcttcaggtccagctttacgaccgacctacctaggaaccggtcgagccaaccccttgaccttttcccgaccgatatcgtcctgctccatcaacccgatcatccgatcataccggtcccccagatctttcaccgtcgaatcgatcccggcggcttcgttctccctcgcctgctcttcgatctttgccagtccatcccgtacgaaatggagtgatcgcacgatctgcgattcggtcgatgctgatggtgataagttcaacgagaccacgcgtgatcgctctaggatcatcgacgataacgaggtcagccgttgattcagagccgcggtggatggtattgacattgcgttgatgggagccaaggttggcagcgatagtgtggtgggaggtggtgtgattagaagggatacgagggaacggtatcagtcaaggcgtgacgggttcaggttgattgtcttgaccagcgggtagtctagctctgagagtgcgatgaagatgcagaagcagcagtgttcagcacggctagctcaagacggacgagatggttggtgaatgtagtggtcgtactacgtctatcccatgttcgaccgtcctcggtcacttctctctcacaagcgcgcgacccgagcatgacatcaggagtcagtccatgtcacatctatctatcacttgcacctcctggtctcgagtcctttcctttgtcaagctatcccagctactgcgcacctcatctcgccttcttctcgcaagtgctattccctgaagactcaccttgacttcccatctctgcgtgcgagctcaaatcgatggtacgtcgtgagaccccctcgcctttagtcacgctcaatcgcacgacccagcttaaactacttgctacgacctacagtcggccctcttcaactttcaatccctgcttctggtctggcttctcctcatctgcacgtgtacatatgttcgaggaaccgcccccaagctgatagacaggaacaaggaagggtgagtgcgcaaggtgccgcttgcagtccttgcatagcgtccccttcacacggctgacctcgtcccttgtctaccggacccagcttcctcgggatcttcttcaagtgtgcacgaataggtcagcttctgggctctgtgatcgagcgcctgacacacaggacgaccagctgacatccacatgtggtcgctctctcgttgcacggaacaggggaacgactctcgccatacgtcagcctggcgtgcgtggctatggccgtcaagatcctcattgcaacatgatttcgcctctccgggttccccgctccgccattcgcagcctgatgctatgtgtctttcttttacaagcttaatgaatcttacatgatgatgtatccctcggccatgtatgcgatgaccctcgtcgacgtgtctggctacgtgtgtcacgtcgtcgattggccggatcgcaacaatatctatagacagcgactcgtgcctccttgcttccactcacttgcataggacgtcagtaggaggagcaggtctcgtatgatcgtatgacctgccttttcgacgtttctctatgctcaaccctatacctgtgtagttgctgatcccctgtcgatcgatgtcacgtgatgaaatttcgtaaagtcgccgctcccggcccctcagaagttgaagatatctcgctcaacatccatgcgattcatactctggtcggtatctctcagctccgagctagtcagtcagcctgctcgtacgatctcccagacatagctcagcaagtatgaaggccaatttcaaattccaagtgagcgggaaaagaacgctgggtcagacctgaaaccgagctgacaagctggacgtgactttaccacatttgcagaacctttgcgggacggtctatcggcagggaaatgtcgttttcacgccggacggcaactcggttctcagtcccgtagggaacagggtatcggtcttcgacctcgttgggtgagttcatctccctttgcagccgaccagacgaggttgtgtgtgctcacgagtcacgttttcgatcgagcagaaacaaatcacggacgttgcctttcgagaaccgaaagaacatcttgtccatcgccttgtctcccgatggcaacgtcctcatgtcgatagatgaaggtcagtgcatggctcgatagtcgataccggtgggagcgtgtcggctgaattgaaattcgaaactcgcttcgaatagacggccaagcactgctcgttcactttcgaaaagggaccgtcttacatcacatcaacttcaaggctcccgtccatgatgccaagttcagcccggacggaaagtgagtccgacagggtcgtcgtgggtgagagtcgctgcatcgtgctaataccgcctcgacgctacaggtacatcgctatcacccacggcaaccagattcacgtctggctgaccccctcgcatctggttcgagaattcgcccccttcgtgctacaccgaaaatacaccggtcactcggacgatgtgacacatatcacctggtcaaagagctccaggtcagtccattagaggagcgttcgggatcgaggctagtgatgaactgacaaataccaacttgcaggtacttcatcaccgcctccagggacatgacggcgagattgtacactctgcaccccctggaagggtacaagcctaagacttttgctggacatcgagacgcgctcgtcggagctttctttagcgaggacgagaagagtgtgagtccgcaggaatttctggtaggggaggtgccgagcccgggctaacacaaacgttgcgcgccgtgttcatcagatctttacagtatctcgcgatgggaccgccttcacgtggcaagccaagaagaggaccgaagaggacgaggacgaggatgagatggaggtcgacatcctggatgcacccgacggcatcgcatcaacttcggctgcagctgccgatgccgtcgtcgcctacacccgatggggaatcgccaaacgagactactttagccagaccggcgctcaggtcgtctgcaccacctttcatcagcgggcctcgatgctcgtcgtcggattctcgagcggagtgtttggcttgtgggagatgcccagctttaccaacatccacacgctatcgatctcgcaagaaaagattgcggctgtcgccatcaaccctaccggagagtggctcgcgttcggggcgcaactcttgggccaactgctcgtctgggagtggcagtcggagagctacgtgctcaagcaacaggggcattactttgacatgaatacgttgtcgttcagtcaggacggacagaacgtcgctaccggaggagaggacggcaaggtcaaggtctggaacgctaggagtgggttctgctttgtgacgtttggggaacactcggcgagcgtctcgggagtagagtttgccaagcagggacaggtattgttcaccgcttcgctggatggaacggtccgggcatacgatctcgtgcggtatcggaatttccgaacctttacatcccctacacccgtgcaattttccagcttggcggtcgacccaagcggcgaggtcgtctgtgccggatctcaagacagtttcgagatcttcatgtggtcggtgcagaccgggaaactgctcgacgtcttgaccggtcacaccgcaccgatcggctcgctcgccttttcaccttccggggcacaactcgcttcggcgtcgtgggacagcactgtcaggacgtggagcgtgttcggtcgctcgcgcgcgaccgagccgttccaattgagctcggaagtgttatcggtcgcctatcggccggacgggaaagagctggcatgctcgactttggatggacaaatcacatttttcgatgtcacggagagccgacaaaccagcgttatcgaagggcgaaaagacgtgtcgggtggaaggatgcaagatgatcgaatgaccgccgccaataacgcttcgagcaagtactttaacagcctggcttataccgccgatggaagctgtatcatcgcgggaggtagcagcaagtacgtcttgatctacgacgtgcgagacggagtcatggtcaaaaagttccagatctcggagaacctgtccttggatggaactcaggaatttttggatagccgaaagatgaccgaggcaggacccgtcgatgggctcgatttacggggtgatgaggaggaccttaacgatcgtatggatatcacgctaccaggagctcaacgaggcgacctgtcgaaacggaagtaccgtcgggccgccaggaccatgtgtgtcaagttttcgccaaccggtcgagcatgggccgcggcttcgaccgaaggcttgttactatatgggttggacgatacgaccaccttcgacccttacgacttggacattgatatcacgcccgaaacgttactcgagacgatcgaagaaggtgaccacctgctcgccctgatcatggccttccgactgaacgagcagcccttgatcctccgggcgtacgaatcaatccctgccagcgatatccgattgatcgccagacaggtcccggaagtctacctcttgacgctcttgcgtttcattgcctcgcatatggagaactcgccgcatgtggaattcgacctgtcttggtcgcaggctttgatgactgcgcacggccgatacctgggctctcgttcgggcgaatttgcgagcgtgttccgatcattgcagaggagcgtcgccgaatttgagcaaaacatcacacgactgtgagtccagaacgacatcgggtctttccaaagaattctagctgatgaccacgcgatcgtttccgtcctttctctagatgcaacgacaacaactatgccttgagctacgtcatctcacatgctacgagacccgacaccaacttggacgctttggccgacgtcgtcgccgtctagttggccttgaaattgtgcgaatggcctgactgcgccggctgcctagccacgtcgaagagcaccttgacgatccatacaaagcatcccgtcacgacgcagagcgtgatgatctcgacgagcggttgttgcgaagggatagcggtaggcaagaggatcctggatgtggtcgttccgttgatgggtacctctgagggatcgatgttgtataggtatgaaccggatagatgatgtgtaatatccaggtccagtgaactcggatcaatttgcaaacctggagtgaggtagcatacggatcagacggatcttcgagtcctcaaaagcaaatcgatgactgaccgatcgagctgtcctcttgacgacaactccacaatgctctaacgtccacgtctttctcgaaattggtctgtctcgaatcgacggctgaaatgcgaatctctctgtagccgctctcatcaggctgctgatatcgagcatgcgtggggacgagcacttgaagcgatctcgtgctacgccataagagctcgacgtgtagctcgttttccaccgtcgtctcattgtgggtctcctttgatgctttgtacccgtacttgacaggtctctcaagatcagggacggccggcacgaggtcccacgacgtgatatcgtcatggccacccaacgaggctccgctcggtctccaagaatcttccaactcgcatgggtcgaagaaaagcttgtcattggtccggaggaagagatgcagactgcatcccgttgcctgatgacctgatacgtcgacctggatcttgggatggatagagtgaggatggatgaaaccagctgatatagtcgacatggctgtgaagtcgcgggctgtagatgaccgttgaagttcgattgcggtctaggctattggtaggcaaacaaatgaagatggaagacgacggtgctaagcaatcatacctgttcatttcgagagcgatcaaagtgcatgtgtgtggcatgtgtggtggatatgttgacgatgtcgagattgaaggagcagcgacgccgttgactgattgatggaacatgtcaggctgtcgtaccgacccttacgcaatatatcattatgaccacagcagtcaggcacggccaatctcacgctcgcttggaagcaaaaaacacaactttgccggcggcgcggacgcaaacccggaacgtcgatgggaaatatataaatcgctcgaccgcaacttccccaatatattagaccttcgcactgaacgaacgcactcaccatcactccgtttttcacctctacctccgcagtattcaataatcaatccacgatcaaaatggtctacactatcatcgttcacatgcaagccaagcctgtgagtcgatcatgtaacaactgctgcttgctccatacgcatgccaggctgaccggcgatcgctactcaggactgcgtcgagaagctcaagaacaagttgatcgaggcctcgcgagtctaccgtcaggacaaggagaccatcgattggcacgtgatgcaggaccccaaggtcagtcattagctttactccctcgccgatgagcttggtagacgatcgggagctcaatcttgtgtcgaacgggatccgggctgttcacaggacgagaccaagtttggtatcgttgagcgatacgagcaagagtcttcccagaagtaccgtacgttcagtccatgtttcgtttcccgatcgaggctgcttgtcctaacatccgatcgttcttccctggaacgcagacctggagaaccgtatgttttaacgactcccttgcatgtccgctccggatcaaacatatgcttacctaccttcattcgcatcacagcttactggcagactttcgacccctacgtcattcccctcttggccaagcccatggacctctctcggttcgaagagatgtgaacagagaccactagcccggacttgtatcggcgatctcgcaacaggtaggagctgtcagaccgggaggagagtattcgacaatcaggatctggaatgtagcacacacagtacacgtagacactcgaggcatgtttcgccatgaaatcaacagcattcacgaaccgcacgccagaggtgactaaggcaggccgctcgaactggagcgtctgatgcgatagagagaactgccatctatacgggtatgactgtatgactaccgggaacactgagcgggcatttcgccaacaggaaatgatgaggtcccgggtgtcaggctggaacttgaaacctttctcactctctccctcttccgctccttcagaggtaggctgggaaaccattcttcgctcaccaggttttcgatgaccgaagaaggccagacggaggcgcgtggtggtttagagctgactaaagactgcgtagctagctccaggtcgtcgttatcgtctgacatgtgtgaacggccgagctgccaagtgcaaaaagagaaatcccaaactacacaatcagccgagagcactatggaccggcttccaaccaatctcctgctatcaatcataaggggctcgcgttacggtatctctcaacgagggccggatcccgtttccagcacgtccagtgctcaacatcttcacagtaccgaaggattggcgagcagtctgccacggagtcctcttgatgccgagagtgtactcgaccagggcatcatcatggtatcgctgcagctcaaaagagcaacgcccggttatcgcgacctcggacgggtctcggcaagccgggaagacgagtggaattgtagtacattacctgaacctgcccaaatcgttatataggagtagcgaggctacgagacgttcgagccatcgggcccttataccactccgctattctgtccagagatcaggttgaccgtgcagttggagctcacggcaggattagaagatgactcatctgcaaggtcgcttgtaattacttctacaagcctgtttctacttggccgcttaagataaaatcaagcctcttgaaatgcacgttggcgtgctgaaaggttttgtttggcaggctattcttgaggtgaaagagctgacatcactccacatgagcacgacgttgctgcttcatcacccattaccaagatcaggtcgtacacgacatatgtccgtaaagtagcggtcgacgttgaagccctgaaacacgtctctgtcgtatcagaacggacaattcaaacttgacgcgatgtccgcgttcccgatcactgccttgctagccccgtacgacaactccgggccccttcatcacggaaacatacaatctctcgagcatgcttgaacaaagacgacctctatcccagacttgaaatcgatgataaccgttggtaacagcccgggggatctcttgatcgtcacttgtatcgcctctttggtccccggctatctcatctttccgcttttcaacgttatcacgagctggcacgatgtcttgacgactctctgaagcaagaacaatccgctttaacgacaacgacagacgaaacgaacaaccaagatcacgcacaatcttcccctgtccaatctggatcgataggtcacgctacgcttgctgcctctcgcagtctacgccgacaacatgaggtctgggccttctggtccacgaagccgtcaaccggcgcatcccagtacatccggtcaagccgggggtcgaccacctgcggccagacccgcagcagacagggatcaggtctttgcttccatcttcggaagacaagctgcgggccaccatgctgcatcaggtcgtccagcaggttacgagcagcctcaaggtcacgcctatgcttcccctaaccccggaatgatgccttcgggcgggtccggctacgagcaattcgcacctcctatgcctccaggcatggctcctgcctacgctcgaccgcctctcggaccaaactattcgcgagacggatcccgagaatcgtatggtgctacttccgggcagctagtgagttgtttgcaagcggtccgcgaattgaccgagattgacgcttgtgttgctttgacctcgcagccgcaggactattcccgggagagaagacaatcctttacgccttccatcgctccatccgtggcaccctcgatggcttcgtcgtcaaactacgtcgtcaacccgcccggtacatctggcccacctccacagggctacaatgcgtcccgccaaccgatgaacccttatcctcagccggctcccatcgacacgcagacgcgatcgacctatgtgcccggtccgtatccagccgaacgttcaagatcgagctcgacgcagagcggagtcgtcggtggccgcccacagccagatgccatgcgtgcaaacgggagttacacgtctcagaccctcccgaatacgcgtcgcaaccccggcttgacaccagcgcaatcgtacaggctgcaagaatcggattatggcagtggaaacggattgtcgtctcccacttcaatctacgaagaacggttcgagtcgccggcggctatgacgccaggaccgcaacagcctacttggtcgtctcccacgcaacccctaaatctccggccacgaccgagctcaggcgctagtggtagaaccgctggagctttcgaggaagagatcggacgcagcgacatgtcgcctcctccagattatagcacgatggaccctgccctcctggtccggaaacgtacagggccgagtgcagctccactacgaatgaacgcggacggaccaccccgactgccggacgtgatttcggatgtcaagaatatgcgattattcgacaacgacgattcgagcaaccgaaactcgaagcaaagcggcgactggtctttcttggcggcttacgacgatgatccgaacgctggaatcggcagcgcaaatggaacacctcgagttccgaatcacgcagacgggcatcatccattacctaccatcccagggtcgcgcaatgtgtcgggcacgagcacagtgcgagacgtccgatcagacagtgccaatgctcctcctgaagcggatgcgaggtccaggtatagtcgtgatgatggcttcgtttcgtctggttatgccagccctatcagttctgctaatcacgaaagcggccggtacgcggatgagctacgaggtatgcacctgatggcttcccttcgcagagcagagtcatggaattgattgattgatctcatcagatcgtgtacatccggtcgtgcggcaagacccatacgctcggcatcgtaggcaggctagtgacacctcgatcgttagcgtcagcactgtgcattctggttacggaacgggacctcgcaatagccagacgtgagttccaaatcactatacgtggcttggggactgtactgatgcggatatggtcacatccagatacctcccgaacatcgatacttcatctcgacaatacgtcgaccgaggttcaccggtcatgtcgtcgccagggacacttgcgggtgaaaatcccttccaacccccagcggcacaccgccttagcggacggccttcaagtgagagtatacagagcttgccctacggccagcgaacaagctatgggtctggggtcgacatccgctccacgagtttctctggaccttctatgcaaagggaggcggccgtgaccgcgatcaggacaggatcccttggtcatggtactcgggtcaggtcacagatgcccctgtctaccatcagtcatccctctcccaacagctcgatgaccaacgtcgccattcatgcgaaacgaccctcgcagaaccaagtgattcgccggacacccaccatccatccggctttcatatcgcgagtggccgaggtgttccggcaggtcctggcattgggagacaggatcaaggacggtctgagctacagcgacgcgttcgatggtcgtgaggctgttgatctgctatgcgatatcattcggaccagcgacagaaacttggcgctcttgctcggacgggcactagattcacaaaggttcttccacgacgtcacatatgcccatcgtctacgagacagcacgcatgagatctaccgcttcaagcaactactgcccagccccttcgccggtccagagggtgccacggtcgatggtagacccgcctcgagaccgacgtcaaagggctactcgtctggatcgatctcggcgttgaccgccatgtcctctgggactagctccccgttggcgacgactccaggacagactcctgctacttccactacgactgtcaaccagctcagcgaatctggaaggccgcgacgagtctctgatgcgtcctctgaggactcgctaccagtcggagtgtttacattgctcaccgattgctattcgccgacatgctcgagggattcgctatgttactcgatcaactgcccccgtcgactcgaagtgcagaaacgattgaacatgaaaatcgagccaggtctgaatacagaaatagcagaggatgtcttgctcgataccaaagtgagtccgcgatatccagggggaagaaagcttggccgttgttcatcgttattgttttcaggaaaccggaactctctggattcaatcagttccccaagatgtgattgatagtgtcgacgatactgagaaaaagcgtcaagaggccatcaatgagctgatctatactgagagggatttcgttcgcgacatggagtacctgcgcgatgtaagcgaagcgtatcagaccattctcacaaggtgatactgatgtcacgacactatcgcagcaatggatcaaacctctacggacatcagacgtggtgccagcggctaagcgggaggaattcgtacagcaggtcttttggaatacccatgaaatcctctcggtaaacatggtactggctgagaagctcacgaagaggcagaaacaagcgcatgtggttccacgtatcggagatatcctcctcgaacaggtccagcgctttgaaccattcgtcacgtacggagcccatcagctgttcggaaaatacgagtttgagaaggaaaaggggagcaatccagctttccaaaaattcgtcgacgtgagtctgtcgcagaatccgattgcatacaatcattgattgtatcgctcttgcaggaaaccgagcgggacccttcctcgcgaaagctcgagttgaacggttatcttacgaaacctaccactcgtctggcccgatatcctcttttgcttgaagtgatcgtcaagtatacacccgaagacaaccgtgacaaggaggatctagccgaggctgtcaagattgtccgagagttccttaccagggtcaacaaggagagtggaaaatcggagaatctcttcaatctagctcagctggatcagcaattggttttcaggccgggcgagaattttgtaagtgagatgaatatcttccgttgcacactgcccgagcttatttgaggcgcgttttcaggatcttcacttgcgtgacaagaaccgagagctggtatacaaaggcccactcaaatgccgaggcggaccgaatgccgaaaacgccgaccttttggttttcttgttcgatcacgcattgcttatggtgaagccgaaatgggtgaacaagcatgagcaatacaaagtttaccgcaaggtcagtagccgtcttgtcgaaggtttagctctcggctcatctctcagcattctccagcccatacccttggaactgctggtcgctacatcccctgaggatataaatatcaagggatcgatcagtcggggtaaagcgacagcggcgcgtccacccggtaccaaaggacccaaagatcccattcccaaagccgactccaaacacggctacagtctgacattgattcaccttggccggaaaggatatactatgacgttgtggtgtcctacttacgccggacggaagaagtggctcgagaacatcgacgcgcaacaacaagctctgcgggacaggagcaagatcttcgataccgtctcgctgaccgatcgattctttgttggggccaataagctgaattgcgcagtaccctacggtacgcctacacttcctcctggtccgaacgtcatagtggatgactgatcatcccgtccctcgatcatagaccgtggcaaccgtatgatatacgggacagacgatggcgtctattttagcaatcatcgggacgagcggttgcggcacccgacaaaggtcatcagtatgcccgacgtcaatcaggtcgatgtgcttgaggagttccagcttctagtagtgttgtctggtacgctgtcgtgatgtgccgcatgcaccaagaaccacttgcttatcactccattcatgtgcagaacggagcgtcacggctttcccattggaattcctcgaccccaccgatacttctgctgctctcaagcgcgggaagcgcctatcatcacacacatcattcttcaagagcggtatatgtctcggcaggactttgctgtgcatcgtcaagtcgagctccttgtcgtccactatcaagacccttgaaccggtcgaccagtcgatgaggggtaagaaacaacccacgccattccgtaaattgttgaacaactcgaatgaacccttcaaggttttcaaggtgcgtcaatccgtcaccgaagaatcctatcggcgatcctgaccaacctgtgcctcctgatatcgcaggaattttatattccaacggaaagcagcggtctctcattcctgaagaccaagctttgtgtcgcgaccacaagaggattcgaggtcgtcgatctggaggcaagtcttggcgccgtatacagctgtgtggaagcagtttactaacttgatcgtctgacaatagactctggacacccaaggtctactggatccgtctgacagcagcctggactttgtgtcgaaacgagaaaacgttcgaccggtcgcgatttaccgcgtcgaggagaacttcttgctgtgttacgccgagttcgcattctatgtgaacaaaaccggttggcgagcccggcctcgatgggctatacaatgggaaggattcccgacggcattcggtatgtggaactcttgtctttgtgagacctggggcatcgactcacgctacgttgtcactcgcagccatgcactatcccttcatattggcgttcgagccgacctttatcgaggtccggcacgtcgagactggcaacctggtgcagatcgtgacggggaacaatatacgttgtctcttttccgacacaccgccatcgcaaatacacaccgccaatcagtaccgaccaggtatggggagttacccctatggacaggcacctccgcctcacgcacaaggctatccctatggcccaggcggcggacatcctgctcacatgcctccccctccagccccgcagccgccggccaatcgacttcagcggaatcagatcatctttgtgtcagacgatggtaacgtccaggtcgtcaggctgaacagggagcatttgcctggcatgttgccgcccggcggggcgcccgctctgatgcctaacggtagcatgagtcgtcgatagcgaaggctctttacgcctatcggatgcgtctccagacgcttttctcatataatcttttaatacacgaaacaagaagaaggaaagcagcgggtgaagcttgccggtctcacaacccgcaccgcacctctcccttctaaaagaagctcccgaacccacgaagcaaataaaacgtcacgcttttcgcttttgtccgccgatatttcgggtcatgtaaatcttctcgattttgcccagatgtttgtccattgtacattgtactctgatgacatacatacatagatacatactcgtgtagacgtttgttgatccccttgttcctcattagttttgcttacgtaataacgaaaatccggggtcgggccgatttttgagttttcggatttggcgatgggaaattgaggaacaacatggccagatgatcatctctcggcagcttaaattggtcgtagatgacatcgaagggtagtgacagagtggtcatagcctcttgacataaaacacaccacgggctcagctcatgttaccataggaacaaccatagatataccctcgccgtcacgtcgtaactatcgaccccttcgcggctacacgtcgatctgtcctgctacgatcgatcgtgacatcagtcacgtaccgatctccctgtcgaaatgatggtcgacgcatcgacggtatggacttcgcccaagttcacctttcacgacgatcctgtggatggcagcgatgatccgagcgctcatttcagctcgtttcccgatctactcgaacatcaatcgtcgaccaagtcgcgatctcggtcgtcatcgggctcgaggctcgacgcgaactcgcctcgatccgtgtcacccctgcgagcagctgcccattttaccgacagtccaggtgacggaaattcgaatagcacaggcaagcaggcgggatcggactttgtccatggctttcctgggatgccctatggccatggcacccggagagaatcatcctcgtcaaccaccatcgggcggatggggatgaacacgaggccgtatagcccgtcgtcaacggggggcgacgctggggcccgcacaacacaacgcaacagcttcgactcgaagagtgggataatatcgacccctcggttctcacgaccaaactcgccccctacactgcctcttatgaggcaattttcgtccggacaagctcctcatccgggtctgcgaacaccctactccgatcctctgatccccgtacccaatgcatcctcttccactttcagcaacaatcacctgccacattttcaacataatccacacatcggctcatcatccatgcatcaggcacacgcgcaccatcatcatcacaaccctactttcacatctccacactcgtcttcacgtcattcaggagagctttcgccgacagacgatttgatcggggtcggacgattagtcgggcagcgaggagatgacgaggtccagcccgaagttctcgatctagtcaacgtgaatgagggagtctccgaggatgaagacgacaattatgacgacggcaacaatacgtttagcaatggcgctctcaaggacgagcctcccacacctcgattgagccacgctatacatgatccacataatgccgctgcgtatcaagaggctcaaaggctgttgaatcaggtcaccaagaacctcagcagcatgtccaggtcggccacactgggcggcaatccgtcacactcaccggcgagcctgatggccgaacttcgacggaattccggagaaggctcagatgtcacgcgtattcccatgagtcctctcgaggacgagtcaggacgggcagggaataccaactttttggtagagatggccaaaatgagcacgagcatgaacggtcagcccgtcaacgggcccggtcatttgcattcgcttgaccccggtcagatgaatgggatcgccgtgcacgaattgcagatgatggccatacctcaaccacctaccccgatcgggcatttcgactttgatgacgaagacgacgagcaggacgaagagcctctctacgtcaacgccaagcaatatcaccggattctgaaacggagggccgctcgggcgagattagaggagatgaacagggtggtaaaggaacgcaaggtgagtcggactctcgcctaaactgtcttcttccttgcatgctaactcgccgacctcctgtgaacagccctatctccacgaatctcgacacaagcacgcatgttcacgtccacgaggacctggcggaaggttcctcacggctcccgagatcgccgcgctcaaagcaaaggaggaggccgaggcgaatgaaaagccacgtccagaggtcggccccggtggtgattctgtaagcggtacgagtccttccgagggtggagaaggcgtcgaagacatcgctcttcgccctccaaccaagtcgatcggaaagggtccaccgcatcaaccaggacacggtccaatcgacatggactggagctgggctggatagactagactgaacgcacacatatacgattcttgcgcatccgttgtatcacactagcttcataccgacagagccacatcgcatcgacattacaatcagccctcctgcctccgcgcgaacacgcagtatttggcttttcccatggcgtccccatggcgtctccacgcttggaaggcattcgcaacgcagggccagaccatgctgcatcctgtacacacagacgtacggcgaacgatgatgttgctcttcgtgcacttgtagcttgatccactgatggacaggcatcaagctaggctgatatttcgacgggaatcgaggcatcggcaaccttgctccttgcttcagcagcggcaaatatatgtaagcgggatcgtagcgggaatgtctagatcctttcaacaagccgtcggcgataaagacaccggtcagcggaagacctacgctgtctcgcctctcgcttgaccactatttgaacgtacaaaatgacattaatatccaacgaacctctctcctgttgcgatcccctctgttgtcgttgcaaatcccgttctatcgaacctttactgatctcgggcgcaccctgctcgttgcttgcatcgatcaacagcctcccacgcacacaaaaagcccgccacccttattgaaaatggtcaccttcctacagcccttcacatctctgtatgctcctcgtggtgacccaagggtgaagaggaggttcatgcgtgggatgtacaaacgtagggtgtcctcgttcgaaagggttaggggttttggttcctgtcgaatgcaattcgtgctcatcagcacgggagcgcacctccacactaccctcgcgtaggtagctttcaatgtcatccagtgaagaccatttaaacggtatcggcctagatgatatgtcagccccgtattacataagcgacaatttccaggaagctccgcctgaaaagtgaatctctgtttcctgcgaagctgtctgttagcctgtcaatgacgcatttaccccagatgcaaggcgtcgaaccgcgatgggtaggtgtatcagtatgtagacgtgagaagaatctgtggtcaagcgagccgagcaagccttggataacattttaacggcaatcctcgtccatgcttctggacgcatgtaggacctatatttgtgcatagcagagcctagcactggcgctctagctgcgcgacttctgcagcagggctgcgaactcccgcgtttcatgttccgtcacgcccggtagacagctcatatctcagcagcgaaaacgaatgctggtctcctttcacgccaatcaaacagattcctcctgcttacaatcgtttgctcacatatggtcgcctacactctccttcgaggacggcaagcggcgtaacgaaaaaaaagagcgtgcgcgacatgcaaaaatactaagctctctgcctgggaatcgaacccagcgcgggcgcgagtagtgttgatagttgatatcatgacaagcgccaatgttaccaatacaccagcaaagatgccatgttgatggagtttattctaattatataaccactcctcaacgtacctataaagtacagaccgtttccagctctttgtctgtccgtgtctttaccgatcagaatcaacccttgcgaccaacaggtatgctatagcatattcatgtatcgtatgtgactcatgctatctgctccatatcttcgtcttcatcttcgctctcactgccactgagatcaaggttgattggtttgaacaccttcggaccggccgactcgattggagcatcgctcgaacggggttgcacaggctcggccatcgcttgcttctgtggctgttgttgctgttgtagctctgtaggtcccacttgaatctcgtcggttgccacgccgacgaccgtctgatcacccacttcgcccgcacccattacttcgccctgagccaaccgcatcaacttggagcccatcatgagccgctcgagcgggtagtacgtttcttgcgtgggcaccgaggtcgtccgtgaagcttcggttgcggccgtcctcgaggtgtaaggggccaaccgagtggcggtttggatcagggtgtcgaccgggatggccgctgtgaagcacaaatcagctccgtcacgttcttcaaccaggcaagggtgactgacccttttcggccatctcgattccctcgagcacgcttctcccatcatcgacgatccccgacaactcgcgtctcccttgttccagaccgaccaagactcgccgtaccttgtcctccagggccaaccgcctctttcgtttccgttgcaacctctgccaccgttcctgatgtctacgtgcgagctcgaccaaccgagcctgttcctctgtcaaggcctccagtcgcgcgtacatgtccgcgacctcgtccaccgggtcgatcgacctggacgccgaccctctacgtgaaccggacaacgaggtcgatagcgtctcgaacaacctggtggcgagcgtgtgttgttcattgatattggccagcaagaggttccgcatcgagacctcttccggtacggcgagcgggacgtcccggggttggacgttttgcttgctccgtctcgtacgtttgatgggcccgccgttagacgccgctgatgaccgtctaggattcgagcacgggacggaccggtaaaacgattggatacagtgagggttcatgtggagggcgacgaaaagggtacaaccgagcgatacagcgagatgagaggtgagaggaggggagtcaacaacggtggtttccagcacgacgcctcctctcacgaaagaacatagggctaggaggggcttcctcactggatcaggttgacgaccgcttcgacctcgtctgcctcgaaatcgttcattgcaacgacatcgacgtcgtgcttcatgtgttcttcagaggtcgtcccggagagcggagtgatcccgatcctgcgcatcaaacatcatcagtccgatagacctaaccccgcttgatctgaagagagactcactgcgaacacagcttgaacaacgcttgttccctcgtgagacgatacttttcagcgagctggcccatcagcgggtgggcgagtaacgtcgggttccccgatagcgtccaaaatgattgatacgtgattccgttctctcgacagatgttgaagactatgcgtggatgaatatgcgcagtggatgagctcggatcagtgttttgctagcctttccatgtagtcgagaggaaagcgcacgaccgccgactgaccctcccaatcccactgattaccctcgtgccatctgttctggacgacggcgagtttgaccctgctctccccgatcaaccatttcaagagcgagggcgagtatatgttgctgattccgagcgatttcaaggtaccccgagcgtggtgttgttcgagctgtcgataggctctcagggtttgctaaaggggaaagagaggtcatctgagcgattccgtttcccaccaatgcgatcacttcgcttagatccgactcgaatgcagacgactcacatctttggtcctcatcggactgtgcatgacgagacaatcgatatgatccacgcccaactgtctcaaactggtcgccacgctctgatccacctgatcttccacgctcgcttgagagtggtaagggatgggtttggatagatcttgcccgtccagcgaggtgaatttggtctgcacgtagagggaggtacgggggatgttgtgagtggattcgagctcggcgatggctctaccgacgagatcctccctgagggaaacgcacaagatgggccatagaaaaagagcattagctgactcgttgcaaaatctctcacaccaggatcatcgagtgcgaatgatgcccgtgcttacctataatgcttgggttgacacgccgtatcgatcgctcgaaaaccgttgaggacggccttgacgacgaggtcggtggtggcttccttcttccatgctgtaccgtagatgatacgtgggacgcttgcggtcataacgattgatgatggacaggtcagtatgatcgggcggggaaggaggaaagggtaggagcaaggctgtttctcctagaggtaacagaggatatttgtggttcaaccatgcatctgtgcattcgcactgagcgacgacgaagggggtacgccacatcaacaaatggtgagtgattcctgaatgacacgtcatgatcatgacggatgttcgctaccgagttggcaaccccatgctacctgacagactcgctcgattattttgataagcccacccatcgacaccccctctggcttctggcacccgaatgatcgcgcgcaacagagtcaggatcaagagatttctgtaaaacagcaagtatcaaagtagttgcaccctgtacacatacaccatcccatcaacaccctcccgtgcacgcacaaccccctacccccgcacggtttatgatatctcgctggactacagctttattccgtcaatcatcccaaatcttgcgtacacgcccatccgctctcgtatccctagctagacccagatcgaccccgacccgacccctcgacttttcgagacacacgagcagcgtcaccaacaacaacaacatgtcggctcctactcaatccgagaacctgcacaaggaccccgtcactggggagatgatttccaagtcgtaagtccgaaagctccatactggtcgacgcccaaacacacgtctgacgcttcgcttccacaatccaccctgttttcgcggtgctctcatcaactagcgagctcaagaagcgtcagaagaacagggaaaaggaagccgccaaggctgaaaaggccaagaacaagcccgagcaacccgagcagaagaagaaggagaacaagaccgaggacgaagagctcgaccctactcaatactttgcgctccgaaccaaacgtatcctcgcgctcagagaatcgcagaacccggacccttaccctcacaagttccacgtgagccagtcgatcccctcttacatcgaggaatggagcgtcgagggcaaggtctccaagggtgacaggctcaaggaacctaccatctccctcgccggaaggttgggcaacatgaggagttcgggtcaaaacttgcacttttacgacttgcacgccgagggtcaaaagatccagatcttggctcaggttcagtaagtcctcgtccatctctggcaatgagatgccggtgctaaacgcccttcaccttgccgtcgggactggactttttcttttatcttcgcagggaagccgagaacgaggaagagttccgacagatccacgacattctcgcccgaggtgacattgtcggtgtcatcggatccccctcccgttctcaaaagggagaactctcgatctctccccgcaagatcatcctcctctcgccttgcctgcacatgttgcccaagatcaccgacggcggtctcaccgaccccgagatcaggtaccgcaagaggcacgtcgacctgatcatgcacgacaatgtgaaaaaggtctttatcacccgaagcaaggtcgtcaactatgtccgcaagtacctcgactcgctcgggttcatggaggtcgagaccccgatgatgaacatggtcgccggaggtgcgaccgccaagccgttcatcacgcaccacaacgatctcaagctagacctcttcctccgtatcgcaccggaactctacctcaaacagctcgtcgtcggtggtctcgaccgggtgtacgagatcggtcgcgtcttccgaaacgaagggatcgacatgacccacaaccccgagttctccatctgcgagttttacatggcttacgccgacatgtacgacctgatggacatgaccgagagcatgatcagcggcatggtcaagtacatcactggcgggaccaaggtcaccttccaccccgagggcaagggagagggcaagaaagagtacacgctcgactttgccaccccgtggaagaggttcgacatgatcgaagagctggaaaaacagttgaacgtcaagttccctcctggtgagaccttgcacacggccgaggccaaccagttcttgagggatctctgtaccaaggtgggtcgagatttttcgtcccgtgtcggatcccggatcgcatggcaaggcagactgacacgcaagctctgacgtttcgatcgatagcacaacgtcgattgttcggagcctaggaccaacgctcgattgctcgacaaggtgagtgatggtgccgggcgtcacccgatacgacgtcggtcgttgagacgctcgattctttacctctctacagctcgtcggcgagtttatcgagaaccagtgcatcaacccctcgttcatcgtcggacacccgcaagtcatgtctcccctcgccaaacgtcatcgatcccgaccgggtctctgcgagcgattcgaagcctttgtcgcgaccaaggaaatttgcaacgcctacaccgagttgaacgatcctttcgaccagcgagagaggttcgaggaacagaccaggcagaaggatcagggagacgacgaggctcagggtgtcgacgagacgtttatgaatgcgtgagtggacatggacggacgagcgggcgaggcgtgtgggatcgaccttgtcccgtagacatgctcacaccgcatcctcgctcttcatagcctcgagtacggtctgccccctaccggtggattcggtctcggtatcgatcgattggtcatgttcttgaccgattcagccaacatcaaagaggtcctcctcttcccggccatgaagcccatccagaccatctcccagggtgagtactagatggtcatgtcgtcagtggagcggatgcagggcccgacgtgcgtcatgaatcgggagggctgatctacaacccgtcgtcccggcgtcccttttccctgtaccgtccttcttttcccctgataccacgtctcccctttcccggtttgcttcccgggccgatctcttccaggcgtcgctgaacaagccgctcccgaaaaaggcgtcttgggacctaccgagaggttcgacaaggaagccgtggacaagcgcgtcgatgagcagaaccaactggcttgagagtagatagactgtaggagatatctggatcggggagcggggttcgcgtgatttcgatgtcgacgttcagatgatcacgatggcatctaggtgttctagcttccgagagccgagccgatcatttgcttccaacgcccagtacccttttcactggaaaaagacaagcgcgaagcttggcagataacaacctttgtacagctgagcagggaggatggaccaatgattcgtgtgacccgatactatgccttgtccatcgaaatggtcacgctcaggcttgacgctgctcgctccaaagagagcggggtttggatcgcaagctgctccgaggtcgttgcaacgtatcccgctcaggtgggccactgttggcctcgtaaacctctccaaacggagaaggaccgactaaaatcctagcactgtatggtagcccagtattcgactcgtacaaatccgaagctggatatacgagacagccgggccacatagaaacgtccccgcgttacaaccgcgacgatgaaagagagccgaggtgattactctgctcgtcgattcggatagagtcacctgcatgttgctattatcattgtgggcgcatgcgtacgtgtgcgagacccggtccatcgccgaccgagttgatggtggaacagggattgtgaacgatttgcggcaagggggacaaggtcgggggcaggaggagggtagtaatcgattcatcgtatatgagtgtgaatgcacaatggaggctgcgtcgtcatggcgggtgaaaatagcatcgtttggacaggcgacaggtgattttgtcagcgttaggttcaatcttggattcgccggagatttcaatgcggaaatggtctcgggtacgatgttggcatatccgaggacgacatagcagaagaagggcgagcgaccctttacttctcatcttgacgcacccgaaagtaggtcttgcggaggacggaagtagacgtctgaaacggatgaatacagtcgtcgtgactggcagggagacgagtcgaacggtccatgttccagaagtcagcagcatggtgcaaacgagatgtggctgcctgttttgcgactcgcgcgactccctggatagatcctgagaatatttttgagacagagatcagacattggagggtcagattgagggcgatgacgttgcgacttccaacagtcatccgaggcatgtctcgatatgacctggcagcaggcgtccaccggtctctcactctagccgccgtcactgatccgagtctacgccctcccgctaggacccggtgtcatctcgccttcgccacgcggcgtgagcgcgagggggacgggggcgggatgtctcgggctcggcagaattaacccgtgaatcatgcgcgacaatcacgcgggaatactcgtagtcgaaaaggagggtcgttgtctcgccccagctgaggatcggcacgagggtaacccgtggtcccttttcgacttgatcgcttgtgcatgatagcagagaggcttcgatcacccgtcccgacttcccctgatgcacagcgtcagccgcgagagaatcaaagacaacgagccgaaaactgttcagggccgaacctcgtgttcggaagggaaaagaccccgatcgccatcggtattcccagctcggcgcgccaacgggtgctggggcagaggggaagccgaaatcagaagagggagagaggcgacgactcggggaagggagccaaatgcgagcgcgtgcacgggcagatctctccttgtctctcttttcgcttccctttgcgtcccggtcgcccgggcatcgtcactctacggaccgctgaaacgtcctctccctctctcgtccggctgctctcctccccttgccttccgctctgatcatatcgcactcgactcaaatctcgccgagaagctttcttaatgctacttagcatccctttatgcggcagaggctgcgggaagcggggaaacgaggaagcagtcctctcacacaaagcctctcgcgaactggcaggctggttgatcaacccgaacatttacattctgtttcaatcgcacccgacccttccgacacctccctccccctctctctgccctctgctgccgcagaaggatcatgattctgctcgccttctgaccatcatcgcaaccccggaacggaatcgctcttgacccgtcttttcgatttcactcataagatcacactcgctttcaaccgatcaaccaagggtcaacccggagggtgctaaaggaggaccggtcttcgatatatacactgttagatctccttccgccttctcctcggctctttcgtacaggccctatcctccctttctcgtagttttcgtgaggatccaccggaccgacgagcgtggaaacgagcacagccattgccaaccgacccaccttcgatcgcctaggaccagactgtcgtttatcttttcctttggcccccggacgtcaaccgcggacttcataataccatttcgaaacttgcctgcaccattcggaggatagatcgatatcgagggacgactccaactcgccaagcagaataactttggacgacgacccgtctctcgctcgctccgtcttagcgctgggttccccttgggaacctttctcggctcctggatccttctttaaactctcacggtccttcttttctctcggtctgtcctcgtgcgcatctcgcttcttccctcggccccgtccttgccattccttaactcactccatgtctctcgctgcttttcttttcgatcgcggtcatgtgccctgcggaataattgcttccaacctctcaaaacgcgatctgtccttcggcggctcttcccggttcccctccctgccgctacctcgtcgtccaccttcctcttcccacattgtcgttaactctgtgatactgatcgactggaccgatccacggttcccttcccaccgcttcggcaacgtcatctcccccgggatccaccatcacaaatacttcatctcgctggatccaccacccgcgatcgcctgcgctcgacaacccgatgacaatgtctcgcaggaatagaccgacgtcccatcggccctgtttgtcagctttggactttacgcgtctgtacgaccgaatccccgaccacaaagagtacacccaagtgtcgcccgctcgattccgatctaattgcgaggtacaagacggatatcctcgagtcctgtccaggtctcgacatttcacgtcctagccgtcgtcgtacggcagtggttctcgatagcgttcggaggcaaacacaggacctcttgaacaggtcggagaagactagaagcgggcggtttcagcccaaaggacgttcggtgatcgcttaggcatcttcgcatctataagcgatcagatcaacgatcaacggagccggtaacgggagggagagaagcgaaggagagagggaagagagagctcggccgtgtttcaacctggtaatcaggtgagtacgatcgcctcaatcgtcgctcgtcgtcgcccgtccgatggatcgatcgcctttgcaagcacgagacaaaagaggagaccattttgtctgacctatggtcatctgcggttgtcttgatcccgaaaacgcagatctcctttttgttcatcgccatcggaggaattccacccatcatcgcttccggccgatcacctcgaaactggaacacagattgagaggctacagttcgaccatcacttgcctatgcattcaggatcgacctagagctcccattccagaaaggagaccgaccacttgatccgatatcaagcccggcctgaaagcatctcggtcaccatggatgaacctcccgccaaacgagctcgattgagcgagtctcccagggccgatcggacggggtcaccgggggacaggttcgccatctctggccctgcgatctcgggtcggccccgtccttccgtcctggcatcccctcggatacggtcggaatcggaaacaaggagaggctcggtccttcaaggctctctttctcccaccctgggtcgtcttcctacaccatcacgacacgcccaactcaaccctcccggattctcctcctcatcttctcgcgcacccggatctgcttcaagctcacgcgtccctctaccctcgatcggtcaaatgtcgacaggatggacatcgcaagtcacgggatacgatccaggtccaggtcctcctccacgaatgccaccagagcaaagtttcgccagaacggacagcctcggtatgatcgccgagagtcacgagggaagcgacgcaggtacggttggaagccgagatcctggtcgcgaacgagcgccccgcagcatgatggcttgtgagtctgggacgaagccgacgagaagctttcacggtagctgattcacgtctccatatgacgactatccacaggcgtacgatgtcgcaagcaaaagatgaaatgcgacggacccgccgcagcaccctgtcgagggtgcaagtcggtcaacaccacttgcgtcttcgagacccgtacgcgatcttcccggccaaaatcaatgtccacgctcgcgcccgctcaacctctccccgccgtcatgtcctcggtcataggtacacccacgacgctcggaccgccgaggtatggacacagatctagcatgagtctagatccgcacgcccatgctccgccgctactcgtaggcacagctacggacgcgccagaatcgcctcgttcgagacagcaaggtcttgctcaaatgcccggacccggaaaagctagtattggtggcgagaggaaccctggtttgccttttaccccggggcaacctgtcaaccagcctggactgttcgcatcttatcaacctcgatcagcgcatcgtccgtcgttttcgacgtcaacactggacatttcgcggccgccccctgtcaccggctatgcggtgccacccccggctatcggtccggtcacctctcctgagactccacgagccatgacagccatgccgcagaatctttacgctttcgaaacccgaattcgacaattagaaagcacggcgcgcaatgtcgaattgctccaagccaaccaggcggcgttgcagaacacggtgcagtatctagagcttcaagtgcgacacttgacaggtcaactcgcggaaacctcagaaatgggactgagccggatgctgaagcgagaaaagggcaagcagagggaagtgtacgtttccgagcggacgtgggatgcctatcggtcgtacatctcgccactcagcccgtggctggtcactttgactcagccgaccgacctctcgggtgaagtcatctccgcactcggtatccgacctcgagtaagcgcgggacctaacgaggctcaaatgcagtcaagagacatggtcagaatcgagctggcgcgtctcgtggcgactggcgaagaatggagtcgagacgatatccatgcgctcggaacgctagccatgtgggaagggaattcgagcttggggagtctggcaatcggacaagcgcgcgacatcacgggcagaagaaatggcgacctcggaaaggagatggttgcggcacgagacacggtcgagatgattctgctcgaacacatgtgtgtattttggcgttgctctatcataaatcgacttgctaactaatcatgacaaccaaaggctatggtcaatgcaagcaccttgctttgtcccttcttccgtccgctcatccgtgtcctcgacatggcgagacaaggtcaagacccatatcccggcctttcccacggaaaaggacaacgacgtcaagatgctcgcctggatcgaatacgcagagatgctgaccgatgtacagaacgtcttgatggacccgagacagagcaaatcgagggcaacgatttctcctcggcccggaagcgtcggttccgtccgaagcgagcgaaagatggtggcggaaaagatcaaggcggagcgattggacaagaggagagagtttctggcgggatgggacgcatggcaagggcgttggggacaaggcggtgatccgtaagtgcttggttgaactatcgtggtcgtgacggcagctgaacaatttcgctcgtcgaatccacagtatccttgcgcttcattatcattgcgccattcttatcacgacgtcgcctttgttgatgcaagagatcgaacccacctcccacgtttcgccaagcaagaccgcatcgatacattctcctcgagaagctggcggtcctccgacggccggaagcggctcttccggacgaggaggcaatcattctggacctttcgccctgtgggaggacctgagctcggatcacgccgggcacgagatgttggtccgcggccgtgattctgccgtcgcgttcatcaggagcatctgttcgcccgagattgcgcgaacgctacactagtccgtatagtgaacggtgtgcccgtcctcgcgtaacaccgatcgactgacgtctctttacgcttgacagctcgttgcccatctttcgatcccgactggctttcgccatctcgcacatcttggcacactcggtcgccttgcctcattctactctgacggcgcttccgctgcatcaatcgacgttgcgactggcatacgagaagctcggtgggaatgcgggacctcccccagcctggtcggcgctcggagacaatagcgcgctggtcgaggtcgtcaggaccggtgatctcacgctcgggtctaccagacaattgtttgccgaggtcgcggatggttccatcgaggtgggccgggatctctgggatagggtgctgggaaagtagcccaacagcaagaggaggagatcgctctcctttcacaaaggtgggctagaatactaggacagacgatacgatccgatcgaccggaggggaaacggacactatacacgacctcgttgtcactctacacgggcccttttcagaaccgttctccataactgcccggatcatctgcatgtttcgatttttcgctttatagggggttttcgaggacgagatgctcagcatgctcatgtagactgtaaattacgcacataccccatccgatttcttctacacttttatcttttctgtttcttgtttgtcggatccgagttgtatcacgagccagatatcgtcgcatcgattgcgttgggatcctatcatattattatactattgtcgatttcttgtactcacggtgcccatgtcgatcgacaaacgacatggcagcggctccgacggatggtcacccatcacttgtcacgtgatttagtgagtgttgcccttgcctccctttcccgagccaacgcgtcgtcgcgatcgcggccttttacgtgaattgtagcttgtagcaagcgtgatcgaggactatggtgctcagttgggggtaccagtccagttcatgtcgagataaacatcacctcgccatcacaagctctcacacaagggtatagaacatagtcagacggcttcgcggagatatatacggcactctgaccggtaggcaagtctctctctgctaccgagaaggagagcggaaaccatcgaaacctgcatggctactctcgatacggatcgatttcgccgccgcgtcttagcttagcgggtcccatcgtcaacaaaccaattcgattcggtccgaccccgtctaatcgacaaatttacagcgttgtcgactcgaacccgtggaaaaagtcaaggcgaatcggggtggccggcgtcctttgccagtgtcggctgaatctcgaccaacaggttcgcccatcatgccgcccggaggcaccaagtcgaaccaggcctcgagacccatcaagacgttgcccaaacccgcaacgtggttctcgtccggcagtctctctgtcaacccgaccgagtcgcccgcaccgagcaagacgaagagctcgggtcgtcccaaaggttcgaatcgacgcaagtcgtcgcccgaaatggaggacgagggggtggtcaataccaagcccatgactcgaagcaagaccggtcacgccagggtcgtcagcggggaagaggacggtttcatcatggtctcggtctcacctgaaggcggcaaggataaacggagcaggacacaactgcaagcgaatggaaaccttcacggagaatcttcctgcgggatggccatggcggcggaaaagctctcgctcgtagagtacgggatgaatcagcctttatcctcgacctcgtcgaccccagtcaaatcctctcaaccaccccgattacctcaattggacctcgcttccggattcgatgcgggcacgttcgactctccgcttcgtcccccgtcgggacactctcgtagtctcaggacgaaccctcgccatcatcagcaacacgacgatcacctcaaaccatcttcgcctccccgtcaagatcatcaggagccgttcgggacggcctccaagacgtttgtcacgagagcccgatcggattcgatgcggggagaggaaggggacgggtcttcccccgatagcgtacggcagagacaggggagctggatcaaacggtccaaggggacgacgaacgcggcggacgcgagtcccctgaatgcgttccctagtaccggtctgggcaagtttggagagggttccctcttctcccctcaacgtatggggatgcaggatgttcgtacgagaaagacgaccaacgggtctgagcggtctgatatgagcagttccccgcccccacccgacacgcctatccaacgagggtcacatcaggttcacaagatgaggagctcgacaggtctgagtgggatcccccaaccgaggttcgctacgatgagacgcccgtccgtcccgttgaatagcatgtcgggcgggagcatcagcggactacccaaatcaaagagcgggagcggatccgccggtcctacatgcgacccggacaattccgtctttctgagcccggcgagcaagacggcgtggtcgtcctccaagtcgatcagaccggtcgagcacgggtcatcttcacgaggcctgttgtcgtacggtctcgacaagccgaggcctcacagcgggaccgcattggatcgagagtacgaggcggacaaggaggcggaaaaaatctttgggagtgggaaaaaggccatcagtatgagcgaacttcgtcatggccaaaacgggcattcgaatgggccactcttccaggtcaacaaggagaatcagctcggagcggattcgccactcaggcctgcgagacatcggaggacggggagtcatcatggcaatcagctcttgttcgccaaacccgccgatcggccgcccatcccgaattcaccattcgccacgatcactaatcgcccacacagaaagacgatgagcgtggagaacgatcattcgagcgtgatgccccgatctttcgggttgaaagctggactggccgactcggccaagggggtcatccctagcactctcggaggaggatatggcctcatcccgaaatcgacaagtggatcgtccaggagctcgatggagagcgcgatctccaacaccaatactaatctgacatcggtgacgagtgcgaccagtctgggctttgaagatccacccttctttgacgacgtcaaaccactacaagcggcctttgaagctggcgatagtcagagggtcagccggaaattcaagggcagggacagcatatccaataatagcctcaaggatcagatactggaagaagctcccgaagtcgagatctcggttgtaactaagccgccgctctttgcgcctcaaccgtctcgtccaggattcttgaagcgtgccagctcttacgccaacgacagggacaagaacgcactatttgcagagactcccggcctcggacctgtcgtggggagcggttggccaactgcgtttgggatcgatttctcagccgcccgggagagtctaggtggggcatctagctcgcgcacggacagacccagcatgcctgatacgccggttaaaaagggctcattcgatggcactgccgccggaaaaagcatgggtcgagttagtcactcggtctcccagccggttctcaacacacagccgctcttttctgccgcaaaggctccatcgattcctacccagatcaccatggccccgccaatccccaagctcgtctttaacgcgggtcaaacgggattcaaggtgccgccatcaccgatgattcacggtaataatcgacctccgcttgtaacgatcaccacgggatcgtctccaatgtccgtcgacagccctagcgtagaagaggcttcgccgaccgtaagaatatctggcagggccccctttggcgtcgctgcataccagatgatacctaccgagccagaaggagtcgtgaagaaccagctggctccaggagcacctcccagtgtgcgtatgggtctgctccgtcgattgagcagcagtgctgcgagcgcgagcagtgaaatgagcgaggatgagaacactcctaccaaaatccgcggcggagaatccgacatgctcgcagcttcccgcccaagtctgctgcgatcgacgacgcctacaccagcacctaaacatgggtctcatgatacctcgctgctcgccgcagaagcggcacctgctcagaagtcggcactgaaagcgccaagtctccagcacatgcacaccgcacctacccctgccagacagtcgctgcctcattttaaaccggtcaaacggatcaatcataggcaatccgcgcccgctcctgtgctaaatcaggatgaagatcttttcgacaagaactttatagcccttgaacccctcgggaagggcgctttcagtcaagttatcaaagcaaagagtcgagataatgacaaggtgtacgccgtcaagaaagctcgaggagtctttgaaggtgtcaaagatcggtacgcctacgcttcgagaaatgctgatggctttcaaaaacgctaatcacaatcttgacaggctccgtcacctcgaagaagttgacattctgcgtcatctgagccagccacaacatcgacacgtcatagcctttgtcgatgcttgggagcaggtaagtgcgatacgtgttaattcccgattacctgtcctgacattgtttgtgacattctagaaccggcaattgttcattcagaccgagctctacttgggaacgctagccttttttctggaggagtatggcagagtggtagaaagacttgatgaggctcgggcatggaaaatatgccgagagatggcagacgtgagtttcagactttaggctctttttattaccgtcactgacttaattatatcgttggcaacagggtctcgcttacatccactctcgcggtgttatccatttcgacttgaaacccgacaacgtgctcatcgacgataccggctgcttgaaaattggcgactttggaatggcaaccagatggcctcggatttcggcagaggagatcctgactggctcaggtctaggcggagaagtcggaaatgccagcgggatttcccgtttgagtgatcgtgaaggggatcgggtctacatggcaccggagatgttgcaaggtgattttacagctgcaaacgatgtcttcaggtaagcttttgtatgttagctctcgccgcagatcatatggctgacggtgtgcatttacagctttggtttagtcgtactggaagcggctaccaacatttgcgttccagatggtggttgtgagtacaagggtttgcaacggcgtatgtttgacggataaactgatgcatacctctcgatagccgcttggcacgccatccgggaaaacgacttttctatcatcgacttcaccttcttatcacctgctttggtcgatctaatcacccaatgcatgcgcgccgaccctcttgaacggcccaccttggcagccctcgttactcatcccattctggagagggctaggaggttaggcaaggatgctcttgctccggaagacgacctatggctgccccgagtattagccgatgccacacctgctgccgctgcagcatctgatatggatgtcgacatgtccgactagtcgaggatttatgcgcacacgcaccgaacagcgcctccacgtccgtgatctactcttgcaaacgacaacttcaatgacgaaccccttaacgacatcaactaccaattttcgtttcgctttcaccttattcaggcctatcttcctgaacctttgtttttgtttctgattctcgctttgtaaaattaaattgatatgtcctgcagtcttctatggtgtcttgtcaacatcgattccgacccaggcgacaaacagcttttcatcgaatccggctcgagtaaacatgttgaccgctgccacattatacgcttcgcagtctgcatgtatatacacagggccggaatgtaagggatggcctggaaatcgcgcaatgaattgccttgccagctcggcaatgacgacttgagcgagccctttcttgcgatgtccttctgccgtgtgcagagagccaatggacacttcgtatgatcaagcgcgtacgagtcagtaccagcgaagcatgagtggaggtataggcgaagagctcacagtcgtcgtgcgtcaacgcccaagctaccagctcatcggtcgtctcgtctacaacagaggctgagaactcgattctcgattgatagtatgccaagggtcgaggatgggaactgaaggcaacgatctggcgaagagttcaaatctcaacctcaagcaaaatcgaccaggaaccgatcgcggcataccgttttgcaatcctcagccgacgctttcctgacacaataacctggcggtacctggacctgctcgtcgaccttgtctacgtcgaggcgtttcatcactcttgtacagttgccttcatataccatcttgccagctaggggtgtccaacaacggttgatgccaaagtacagagccttggtctttttccattgtatcaaggtcggcacgatgccctcctcgtacatgtgggtgaacaaggccgcgcttttctcggtcggtggagcaacgtgatcctctaatgaagacgattgcaacagcggttcgtgcgacacgtataggtcgatgatgggcgtgtcgtcgaccattcgtagaccatttgacatcaccaagatcccgaatagggcttgcggatctccttcctggccttccgaaggcaattcaccataaatcttgacaaagctgcgtttcccgtgatggaggatccaggtcttccagcatgtttctcgatcaagttgatacacattccgttccaacagtggtgcgaggaacaaatttcttagccgaagagagtagggtagatgatgagaagtcgagaggatcttgatcagcctaggcagatccgtgcagtccatgcctgcggtctcgaaaacagtctatttccgacccaagatcgagatgctctatgacgcagagcttcagtatatcagagtaccaatagccagcctctggataccgcttaaatcattgtttctatatgctaggtcttccaagtcgatcgaggaaattcgatgggaaattcaccgaaatcccgacaatcggatttgaccgagattgagttcgaaccacatgggagggcaaacaaaggctaattgatcgggtgttacgggcaagatctgtgcgatgattgatcatgctatcctcaatcatatgtctatgtgtgatcaccttttcagctctttacacttcgtgaaatccgatattatgccttcaccagcttcccatctcctgtgtgtcacgattcgcatgtgactgtctaatctcgcggtagccagctcaagcgcctttcgcgagcatgcgcccgctctctctcatgccgcagcctcgcacgatcttgttcggttgcatctcctcgacttccgacaccagtttggtaagaggggcggactgagccgggatcttgaagagcctgagcccggccgcggtctgactgtgccggagggggtatctcgtacccatagccgtaaggtatgccaaattggccgggcgcgaacgacccggggtgatacgtgggtgcagcgtaaccactagcggccagcggggggtaacggtttccaccttccatctgggacagtggcatgctacggcctcgaagttggaatctgtccattggtacatggtgctgtcggtcggctgccaatgttagatcccgatgcgtatagtccggaggcgctccagccggaaatggtggtggcgcaggaggcaagtctgtcaatctcacgctagggcttcgcggcagaggcgaaacctcgcgatgcgccgccatctcagcatcgcgaggtcgctgtgcgaggagttggtacgtcagctatgcacaggtatcactatgtgttcggcaagactcgcctcatccaccgatctcaaacaccaaaccgagagaatctgcatgactgatggagtatccgctttcctgctgacgacagggctgaccgagcatttttcaaagtttgggtcctagaacacagcatgtgcatcagtctgatcaggtttgatcctgaaaaagaaacaagtcggagtctcgcttacaaagtggccgaagacccagtactgaaggttcgttgcgcagaagaagaaacagtggttcttgacgcaatcgtcatagatagaggcttgcagaagattcgcttgtcccctcaacgatcgcaatttctccggagagtcgcgtttccattcgggctgagaagctcatcatttagaggcgtatgtttacgatgccatgctatactcacattcgcctgtacgaaatcttgcagctcttgttttccgatcagccacgggggtctgatacaaacaatcaacgcgcgatccatcggaactcggagatcgaccaagaccaagcttccacatccatcggggagctcggtcttgttctcctggcggacgcctccgcgagtgaagtggcttcgtccatgctgatctctaagactcggcgccaccgtgtccgagagaacttggaaagacatgttctgcgagttgtaacgaagcatgtgaagtattgacgtcacggttttcaagacctgcaaacgaatgttgatgctaaaggcttgattcgatacgaacgatggaggagatctttcttacgcagcctgtcacccatcccagcagccctgcatcctcagctctgaccgcggcttcatcgccgaacccgactgtgttgaacccgtcggcggggaccgcaaagattctatagacgatagaccaccttaggagcgacactgacagtataccccagtgtaacttactgttcgccccatcgattttctcggctgatcggtctgtacggaatgtttttctcgaaggctgggacacgatgttagattagcgtcgggtctcaccagcgagcgcctctcacttaccttgctcgatattcctgaagaaactctttctttgtgaccactgtcgtaaaggacgttctgtggacccattggtctcgtttgtgtacttcatgacgcttgacactaggcgatcaacagtacgtgcttttggcgagccttcgacaaatcccccacgaatgtcgcttgggatcattgacccggctccccacaaaggacgcgattgccatcttccgcgctccattacgaacaccgcttgctctccgggatcgatccatttttcccatgtatcgatcacagcctttttcagatatagattcaagttgtctgccggttccaggggctgacgcatagcggggctgggctgcggcagcaactcgttgatattcggcatggaagcattcccataagctcggtcgtattgtgatctcgtttgcgagccgtcatccgggtcatagatcgatgcacgcctgcgaggcataaacggcagggcttcacggagactcctcaaggagaatattttagaattgtcccctccttgatcccgaagtctcgagtcggaatagtccgtcgcataggcttgtcttcctgaactgcttattggtgacatcggaggggacgacatggagctgaacgaaggggctattggggagaaagaaccgccataaaactctccttggcgtggaggatatggatagacagggtacatcggtccaggatgttgagggcccggtaaagatggcagtggcttgaagtgataagcctgcccaggcatccgcccgagctcgctacggggtcccatctgatcataaggtgacctaggtggtaatgaagctcgttcgattggcattctacgagacgtatcttcaacatcggtctggattgtcctgagcgctggtcttaggtgcctagaatcgaagttcctgtgagccggttcctttctcttgaccgcgcctcgaggcgacctgatgacttcggcgttatctctcctcctcttgtcccttcgtctatggtcatcatcactgtcgacctcttccaggctttcatgatcgcgctcataaccttctgcgtttctgttccttgcattccccccgttgatgctcctcggtcgacgatccatcatcgcactcgaagcggctcgtctactggccactctgatgcgcttgagtgcctttttagcgctcccgagatccttgaaagtgtattcgacggagacgccgctgtctccggtagtagcggtggcgtttcccgagagtcgtcctttcgatcctgcgctagagggcgcggctccccgtcgaggctgagaattatgcaggacacccgatgcgctcgcctgagcctgttcgtcttcgctatctggtggcgggtctcgggggaagggggtactagaccgaggagggacgtaaatctggtcgacgatatcgacgtcggtatcggggtccggttccggtgaagggtaagaaaggggttgaggattggtggcggtcggaaccttcggttctcgagacatccgagatcgaacaatatatacaccgggtttagccctcccttttctcaacgagccgaacgacttcgctcgatcggtcgaatttcctgttccctcgcgtattcctccaactgatcgactcttctctggctctcccgtctagctcgtctctctctatccagctcgtccaggtctatgtctcgtattccgtactcgcgctctctccgactgtcgaaactcgccgaactggaaggccgataataatctctctgtcgctcttggggcgggtaactctgattgatggcgtactgtacctgacttcctgattgtgagcgcgaatgcgagtacgatcggggattccgcgggagagagcctgtgtacgacccgatggaatgcgttcgccctggatggtcgtatgaggaacccgagcgataaacctggggtacaggctcgggagcgaagtagcccgatcctgatccgggtcgagggagaggaagttgaccctcgtgcggtgtggctgggcgataagtgtgaatcgaggtagcagaagatggtctcgggtaagggttatgttgctgctgtacggatccagggggaaggttgtgatggatgtgcacgatctggggggtagaggggactgggtaaggcgcaggacgagcgatggtcacgggtccgacttggggtggcgggaggggaggtggaaagttgccgtctggcaaagtccaacttagtctggtcaaatgaaacactcgaacggcgaaataaagtgacgatactcacaactttcccacagtctggggatacctctagatctcggataaccgtatatcggtggaggtacgggtcctagatgaggtccgtaacttggatgtccgggcccgtaaccccgatggtacctttcttcgtcgaagcaatagtaacgacacccgcaacagtcgtcacagcagtgataacaatcacagccccagagttcgctgcaatagccagcggaacagcagactcccatcagcccggacaaggcgagtctggctgtggcggggttgtaatcacaaggaggggtcgtgatcgagaagcaagggagtggtacgggacaaggatatgggcgatcatatttaggttgtggagcgcaccacttcgaacaaagcggagaagcgcgttttatgatgttcaaggttcatgtcgttgtgtcatcgtgaccttgttttctcttttgtgtcagccgatagagacggggacagacgggtcatcatgccgatcgctatcctctttttcatctgaagctaaaccttcttttcttcttcgcgacaatcaaagcaaaggacccttttcgccaaaccttgtgaaaagccacgagaagccaaaagaaagactagaaacatcacgcgggccccgagtttcaaatcgatggcacggaagcgcggatggtcgaaatcacaatcgtgccaaaggaccttgatcgccgataaattcctcacgtaagctgtttctagagactcgaagaccctgatgggatccatcgtcaatcgtgatggacggctgtccgagacctcaaaaggttgaaagatccgaagctgggaacaagcaggctcgagggaaagagcttggcgaggttgaaagatgatctcgacgtgctagcacacagcaagcaccatgatgtgatccggagtttggactgtgtcgagtcgagttccctgcagtgcgctcagcttgaaaatgttgggatttctgctcagactatatcacaccgagtgtgcgattatacaataatatttcgatgcaagcggccggaccatgcgaaaatcatccttccctcctcccttcccacgtcgcctgcctaccgactgatagtcacttaccttggtgcccggtcaactcgacaccgaaggcgatggccaacttggaaaactccttcatgtggtcgaacgaaaactcttcatgagcggtcgtatccccggtcgagtggatcagcttgtccgagtcggcaaaagtggattctaataaagcacgcgtatgtgtgagcttgctatcttctttatcgggagagagcgagatgagtgaatcggtaacgcaccgatggtaaaggcagactggtatccagcctgagagaagctagcgtgatccgagcactgcggcaagatggggtgttgataagcaatctgcaggaggattgcgaaaggatgcaagacctggcaagactaacagcataaccacacttggtagggacggcactgtagcgcgatggatagaaaacagggatcaatcagtagttgccggtacgcaaaccagcccatccgagggtatttacgggatatccactggaaacaggcgagatcacaaacgttgcatcagttccgtgtggtgcacttaaagcgatcattcgttcttgtccaaaccacgactcacgataagcgcctacagcctgggtcatgaactcgctcaacgccgggtcgacgtaatcggtaatgatccccacgacctcttctgtcccctttttgacccaggcggtcatgtccatctggaccatggctttgacgacgactccctcggcttcgtactccttggcgatcgcttgggaaccaagcagtccaccttcttcggcggaaaaccagtggaactcgaggtcgctccccgaggggacaaagccggcttcgttgagcgccttgaaggcgtggatggtcgaggtcgtgcccgacccgtcgtcatcggctgcgattacgggggaaaagtgttcagtgagtgccaccctaattcatcctggccactctgcctcacctccaggcgcgggcaagaagggccacaagttggtgctatcctgatgagcaccgacgacgacgacgctcctcttcttgtccttcttgccatccgacccagctgcggggatcctggcgataatactgttctgtccccaaggatgctggaacgacctcacggtgaccttggtcgccttgttcaacttggcaaactcttccaccttgccctgtagccacttggacgactcggcacccgtagacgacttgtagtaccgggttcggaaaccgccggaaaagtgtccgaggaaatcacgcatcgagtcggtcgagatgctggggaagagggagtggatgaattcgttggtcgtgctgttggccttggagggcgaagggtagtcgaacaccttttgatgcttgccgccgggcgagatcaatgatgcgaaacccagatcggggtggtcagtgctgaggacagaggcgaatgagaccagcacaagaccacgtcgtattgcaggtcgagcgtccgactcacatgtccataaatcgaagacccttggccttggcctcgatcttttccaactcggtcatccatacgggcacctcgtcatcgccgaacctgaccaacctcttttccttgaggtcgaggtcgaacccttgttccttccactcgtacatggcgttcctgatgtgagacgatcgatcatcggtcaagagggctgacctgaagatctcgtgtggggaaggagcctggagcggggattgcggcgaggctacgaggtcgggcgtagtgtgcatcatgggcgaggccgtgatcgagctaggcgcgatggccagcaaggccaggagggggatgtaactgagcatattgaaaagtatgagcgttgaagtgtcgaagaagtgccaagcggtgtctgaaccagagtaattgattgatgttgttgaagatgatggtcgtgatggcgatatgctatgcccccccttgtggtcgacggcggatcgattcgcaagtgttgctgctcgcacttcgccttgaccgcttccggtgatgatgagcatgggggggcgatatcgttatcaaatatcggacatgaccgagctcacgagatggcgcgatgacgtgtcacacggaaatataattattgattcatcatcatctccacgcattccccggttatcacgatccggctaatcagaacccgttgacctcgggcgggagttgagttacaacgttgaaatacaacccctcaagggcgaccgcgttattacaattgtgcgcaacatcgcctcgacacagacaccacattcgcaccatcacaaagccaataccgatttaaacatgtcagaactcgatgccagctccctattcagcgtcaaaggccaggtgagtcgaaggaacgtcgcgcccctcagggacctcccgactgacctgctcgaccatcggatttacccataacaggtagtactggtcaccggaggagggcgaggagtcggtgaaatggtcagattcatactagctatcttttctcagggtctcgaaactgatcagatcgaccatgtgtgcgcagatcgcgacaggctacgtccagaacggagccaaagtgtacatctcgtcccgaaccccgagcgcgctcaaagagacggccgacaagctcaacaagctcggaaaaggagaatgtatcccgatcgtagctgacctaagcaagtgagtccggcgagacggaagaacctttgagcagtgcggctgggctcgctgacattcgacggtatcacgctaggttcgacgagtgtgtcaagctcgcagaagagatgggtcgacgagaaaaaggtgtgtgtcccgctcttagtctccatcgaccctcatcctgtctcaccatcaaactgtcgtgccccctatctcgcagtcctcaacgtgctcgtcaacaactctggagccacctggggagaatccctcgagacctacccggatcaggcgtttaccaagctcatgacgctcaacgtccagcgcgtgtttaccctgtgtcaaaagctggtgcctatgctcagaaagggcgcggaaaacggtggagtcgggaggatcatcaacgtgagtgtgtctgcggctacgaggcggggacggtggtttcgcgaggttccgctgatcaccgggtcggcctcttcgtagatcggaagtatcaatggagagatcccccctgccatggagacctatgcatactctgcatccaaggcggcgcttcaccagcaagtcgattgttcccctttgctgacaacgtgccatgatctcggtctgaccctgacataccgcacagcctctcgcgccacctcgccagtcgtctcgctccggacggcatcaccgtcaacactctcgcccttggtcccttcccatcgaagatgatggccgccacgctggacaagttcaaggacgatatcgtacgcgggatcccgctcggtcgggttggagagcccggcgacgttttcggagcgtgcctgtggttgagcgggagggcgggacagtttatcaccggtgcaacggtgcccatcgaaggtggacatctgatcgcggccaagttgtagtttgcgcgagacgcagtcgaggtggctcatcgtgtgaacatggaataagattgtcgaatcgccatcgtcgtgcctcaagtcacattacccacttccgttctcttgcccgtgcgtgtccgattctcgctaatctccgtacctcttgtatctcctctcgtgtcgtgtttcggcgtttttctcctgaaaacgtcgactacaggatgcccgtaacatgtgcaccttgcgagtcgtaaccctgtgtgaggtgccgcgtcaaatgtcgagtcatagcgtaaagggagagatcatgcttcaacacattattgatgatcaaccgtatacggttccacctttttactatacgatgtaaacgacgtgttatctgggtacgaccgtagttcagcttacccctctgggctttgcggacctattctcgaatctccagaggcgtggtagatatccgagtgatgacggctgctggaccgatgtatagacgagaatgccgacgaggcgggttcgatccgcaacacactttgtttgtacaggtcattatcctcgttccaagtgatcaagcacgctacaacgacgaaacatcgaccagggagccggtgccccccccctccctcgccctaccatacagagcgctcgatttcctcttcatcttccgacatctcttttcgttcacaaccgactcttgatcttctggaccaacccctcggcctcgtcatcgtccaggaaatcccggtaggccatctctcccctcaacatgtactgatgactgggcggggacgacccggcgggtttgtgcgcgtgactaccgttggactttttctgacggttgggtttctttacagggaggtcgcccacggggtcggaagaggtcgacgaagggttggggttcggcttagggatggacgcaaatgtgggtgcggggatgaggtgccagtgaacctatgcgacgggaagatagggaggggaggcggaggaggttgtcagccgggctggcagatcgggtggaacggatccggggcgatagttcggcagggacaagggagggattgtacgagacgacttacgtgctgtcggggatcaacaatacggccaggtgggggatcagaaattgagcaagtaatcggtcaatctttgtcgggatgcgaagattccaagtcgtcggccgcggtactcacatgtaccgcctgcgcataccctgtgcatatgaacgatccagcgcacgcgttgaaccgccagaggaaacgatcagcccgagcccgaccccacctgccccacctacccctccaaccaaaccgaatcgaatcgagacccggcgactcgactcaccctgattacagacgacattcaaatccggattccccgtggcctcgcatacggcgttgacgactttcggaagcgccatacccatcttgccggccgatgcggggtcgaggtcggctagcctgaccacgtgggtcttggggatgaggagggtatggcctggtctcatgggatagatgtctgtgcgatgagaagtgtgggtatagatgtaggcatggtgcagggaggtggaggggttgggaaacggacccgggagagcatcgacatcagctcgatgttggccatagcgctggggctgatccgatgagcgttctcagcaaaagactcgcctaggaacgccatgcagtcttcatcctcgtagacgacgtacgctcccgacttttcggcgacgatgcggcagaacgtgcaattgtcgtcccgtgcggggaaagaggaaggtcggtcttgcaccgaacggaggacgaacgaggtcatggtcgcgtggtggtcgactggggatctgcgggacaagtggaagtgaacaaggatgaggagttcggtgacggtggggcggtgtctgggcgggtctttatgcttgatgatgttgaagggttcgatacggtcgattgacggtgatgtacgttaccgggatattcgtcagatcaggcacccccaccccccatatccccgcctcgattaggaaacatccgaagttgggattcgatcgatcggaagcagatggcgagatgatcacgacaggaatcacacgtcatcaacggtcatcctgtgaagtatcttgataaggtagattgtcaaaacagagataatcccgacaaatcccgtcatccatacatcccatcatgcatcgtcgcgcgcgagttttacacgaccggcgacaacaagcagcaaccagctgtgagatacggatccttcgaccgaaaaggagaaacgctgctaacacaccacactgctgacggttctttcggcccgcgcccgcgcgcgcgttgtgacaaacaaggggagagcagcagcagcgacgtcgtagtaaaaacgatattacacggggggattccacagggggagacgaggacgagacccaagtttacaggggggtccacaagggtagtctgaccaacgaatcgtacccccagagtgcccccctgcttgcgtctgtgtggggtctccaaaatcaaagatacacccacccacccaacagcttcggccagcaacatcatgtcgttcacgggacccccccccccacctttgcagaacatcattccacaaacatacaaccttgacgacatcgacgtgctgatctcctcaacgacgacgacgattcatcttccctctcttcatatatcacgagtattgacgtagcttgttaacgaaaagaaaatggtcagtccccccgctcccaccttgctagcagccgcgacatctctctcctcgacgcattcccctttcattcgctcatattccgctgctcgtgctcgaactcgatctgatcttccacctcacgctcatagccatcacaagcagacattcggcggcgtaatgccgcgtttgtccaaaaggctcaatcgggcaggaaccccgtgaagccgccgagaaaggacaagcccagcgtagggctctgggtcgtcgctggtatcggtatcttgctggtcggaagcagtaagtcggcgggcgaattcccattcgaggtcggtgatcacgtctgacgagtgtgcaagctgaattggtggcctgtcgactcgatctccctgtagctctgtttgagatcctgaggttgctcttctagttcgagcccggatcgtcgaatcctatcctatcctatcctatccctgcctctccttttctctgtacgaccctcaagccaagatctgaccacgctgggctcatcaacaatgagaccaccatgcccccacctcccccgacctcgctatcccgaaacgagcataaaacaagaccgggggccccttacctttccgctacctcatacgccagggacccctacgccccggaccgagatcgagactttttccctttcgacatgatccatccatccgcgacctcagagtcaggaccggccgactcgcactcggctcactctactcgccggatcggctttcggtcactatcactttccacgcctgtcctcttgcgacgccccgttcagatctctcatgctcgtcttctttcgtcgagtccggggtagggactacccgtcctcgcccgtccggaggggtcgaccttggattacctttttagatgcttgtttttcatgatcgattcgatacgatacgaatcaaaaccacgaccaaatcaaaccaaaaccagatcaaccggattgtggcgatgaaaggcgtggatgccgaggttttatccatgtgcagggaaggggggagccgggacgtgggcccgggtgagacgagcgcgaggccatagatgtgtgtcggagcgtgacaaatggcaagtgaggggccatccgggacgccagtagaagaaagtcgcccagtgcggcggaaattggtccgaagacactccccctttgcattgtccggtacggctgatcgagctcgtgtgggcaagtgtagatgggaagtacaggcctgtcgttgagagaagtcaagactctaggttagctgcgtggggattcttcatgctcccgtgagtcggacaaggcacggcaggacgggggtcgaggaggcatgcatcgtcagcgtacacgaacgtgggaagagtaggtgcaatctcaagcgtagtgaactttccataccgacgaatcacaacgcctcgagcatacccgtacctccgaccccttgcaggggcatggcagacctctttgagaaagatgacgaccgacccgggctagacactgacagtgaccatcaaaagacgagacccttgttctccaaatcatgataccggaccgcatccccgggcggcccgattgaccgtcaagcgtaaagtattcggatagacgggaaaatagccgcaggcgtacaagagctacaagtttgcgccacaatttggttttctggcaagttcaaatatcgtacccgctggaccgactgataaagccacgtcgctcggaagcccgagaacaatgaaaggctaccaagcgttcatccggtgacgtgcagaaatgcgggagaaacggctgacaagatcggtcttcctggctgagcgattcccccatagcattgtagtggtgcgaatgaccttccgttggagcgtaattggatgacgagtcgccgatacccatcgcagagacagtatccgctatggcgcgattccgatgttatgcttacctatcggactgcactttgtcggccaggtatggtgtgggatcaggtcgtgaccgtgaagagggcttgtcgggtcgtctcctttgatagcaaggtcgacagggtcgacaagtcttcagcgaccgaggctggcggaagcaaggtcacccagcgtctgatcaagaagcgttttcacctccttctccaaggccactgtgcgatgcagatagacggtcggaagtgagcaaagccatcatgtagtggccttcttgtgaggtaggccgatatcacttaccagcttctgcaaaggccagcttgtattcgtcgtttgcgctcttcatctcagtttccagcgtggccagtcggtcgttctagcggttcccaaaaggaatgagacagggaccaagacaatagtgaaggacatgttgtcaggcgagtcgggccagacgaagagaaacacagtacaataccaacgatgggtccgacatcttgtttctccggtagattgtcaatcaaagcctcgacttgcttggcctgctggatataacggaccgccaggtccgttttgaagcctgaggcgggggtcacgtagccgacaagcgtcagctcgagctaccccttttggcaacgaggaggaacccacggtcataactttcttcggtctcgagttccttgagctccttgatgggtacaggagctacgggaaggtcactgccgtcgatcgatcgataaggcaccttgaagctgaggtcactcaagttgttcttggtctgcgcgagaagctgagtttcaagtcgggcaattcagctttgtactcctgcatagcgttgatacgtggaactaacgtctatgacgccagattgaagcttcatcaagaagtgaccacgatcggcagaatgtcagatgattgtcgcgttctagatgcaggctgaatgctaacctgggatatccggtcctggggaattgcaagactgttagaccatcgtcctcacattccatggcatcgattcgctcaccattttgatcggagagctctggcctcactcttcgcgcagtatgcttctcataaaggtctgtggcagctgggaggtaaaatctttgcatacgttgtgtgtacaagagtacaagagtagaatagcaggagctgcagggtcaatactcccggtcccgagtgaggtggaggtcaagctgagcgaatcggtccaagttaagccagactcgtcatacatgtacattcacctactttgataatgggctagaagctacgctcgacttgaactcagagacttcgttgatacatagatcttatctgcgacggttgatgaagcagctcgtccgaccagaagacctctcggtcgtgctcaccgtcgcgaccgacgactctgctaccgagttctggaacgctaagcacacatgtcttcatctggccgaacgatcaccggtatcacgttcggataaagatcaaagtaggcacagcctcattgcagctgtcggatgtcaagatgggtctatctggctcatagacactggggtcaagaagctggaggcaccgacggcaatcatcaacgtagaagacgtcgactccgtcggatccagtaaaccggggacgccggctttgtccatcaaggatggttcgcctatgctgtccaggacttcctcgtacactcttctgcacaatgcggctctttctccaccttcggtctcaaagggagagcttgcgaccttcatggaggatgaaggaacgacatccaggtctaggaaacatgggtcaccatcgctaacatctccgaccagcaagtcggaaagctttgcgggcttaggattcttaccagtcaggggtacctcggggaagactcgtagtacttcggtctcccaggatactgcgagtgccaggctggccagcatcagtgcagctgacgacaaggctttgagaatacgtctgaatcacgccagccgagattcgaatgaggtggcagccggtagcctcatgaagctggttggtgacgccaggggaggcctggaggatctccatggtaagagcgagaccgaaaagccgatacgggcaaggtcgtccaaagccagtccgagagatatcaaggtcgctgctccccctcgcaggacggcttcggaaattcgagacgaagaaaaggtcgaactggactatgccgaagcgatgcacgaagaagaggagatggaacgagtgcgggaagcggtcgagaatgcagaagagaaagcatgccgggactgtggtccgaatgatcacgatgcggatcagggagattcgcctcgcaagccgtttctcgcaaggattttgccgaccacttttcaaggtaatccgatcatcgacatccggtcgttgccccttacaacgagcgtgatcgctttaagtgagcgagggtatgttccaaaatacatgttcgtttctaaggagaaacaggctaacgtacctctttgctgattgcctcatttcagtgtctgcactgcaatcaatctggatgcaatgacgctcggggacaagttcgacattgaggacgcttggagatcttggaggggtgatacaatgacgaggcctaacttgaatcctccacatcgatggcgaggcctgcttccttgcagtgtcggtacggtgagttgtttgcgatccgatctctacatcgttagctcattcagtcgtgctcagaaccactatttcgtggcttatgcgcattcaccgaccgacagcgctatagatcaagcgaaagatctaaccacggtggcattgctcgccgtgaaaccaaagtcgcacagtatatcggcagtgggcttcaacactttgcctggacaagggcaaattgcggtcgcggaaggagcctcgggtgagtccgatgtccgattcctcgcaacatcgtcctcttgaggctaaccacgcgggaaatagctctgtctctcttgcacttgtgtgacggtcaagttgaccgatatgaagtctgtctgtccagtcccgcaccagaggatgcaaagatacgctcctctcgctcacatgtcgatctcaagtcgttcttcacgcctctgccaactcgaccccactcacgcgccggacaagacggagctgaacccggcaagagtcgtattgcaaaagaagatcccgggaacgcttctgactttggcaggatgctgggcaaaaagctacttgggcggtcaggagacaaatctcaggtcgagaagcatgaaatcgtattcatgcttgggcccgcctcagcaatacggccggacggaatattaccctggtctggaattcgagtagatggatcgatcggtattggatggactggcaccgtctgtcaggtgcgttgaagggtctttgcctataccctgaagaagcgctaaacgaacattttgcgccggccttcagctgttctcggtaacgaaagatggcctgcaactaaggaagaacgttgctcagcccggtaccatctccgctattgcaatcgctccggaactctcgacgatcgcgatcgtctgggaaagcaaaatcgtctgcctggacactggaaccggcgagatcttgagtgtcaaagatcagcagacgacgaggcgtctctctatcatctctacttgcgccttggggaagatggccgtcctgaatgatgagctgcttttgagtggagtaggtccctcatccacaagcgatcctgtggctatttcccgacagatcgacacggcagaacagacagtatcgccgatcaacgtcattcaacccttccgtgacgccattctggttggtgactgtgagtctaaacgtctattgtgataggtcagcggcgcctgaagtcgtctcatttccagccaacggcagattgtgtatcgaatcgttcctcgacgccttgaatggttccgaagccggcaacccgctggaagaagacccagacgcttttgaggccaaaatatcttgtttgcgcctaatcccagaccaaaccgagaaagagctgattttcgctgggtacgaggacggatctatgcgagtctgggacgcggataatcttcgtttgcgcgcatcatgttccgtctttgcggaccaggtgcaacaaatcctgattacccgagatccgaaagcgggtcgtcttgtggacaagattctcttgaccagccgagacggatcaatggcagtatttggtctgggagagacacgaatgtaagcatcgtggtcaacgaatcgttttttctttttttgatgttgctttcttgaacgtatctcatttccacttgcaataatgcagtctttatgtcattccaggatcagagttcccgatccaccgtgcgatcgcgcagaaggacgatcttatcattatttcctctcatggtcgagcccgagtgtggaatctggtttcgggagagttcagacggtctacttcagtagatgctgcagcggaaatgctcgccatgggggaatggctcgaactgtaagttatactggaaaaaatcgagacagagcccttcgttctgactcaaaactctgcggaacaggcctctgattccaagtgacgaaaaaggtcgttccccgctgtcgcacgcccgtaagcactgagctagctcgaggatcaggcctgagcttacaggttacgatgtgctctggcagaacccaggatagagttgggtctcgaccgatgggagaatgcggtgatcagttcccgcgattggatttcgtcattacatgagactgggatctcgcaatcctcggatgatctcttctcgaaggagctttcgttgtcaagcgtgtctggaaaagtgaacttcggattacgaaggtgcgtatacacgcggtgacaatgcaatgatctgggcagagcccttatgaactcggctatcatccttagctccgaaggactgatcgactatcgtcaatccggaaggggatcatggaaaatcggctcgctgcaaaccttgatccgtcagctctgcctcatcaccgcgttacatcgcctggaccgggaacacccaagtcagttttcttcaagttccccaatactatgcttgtggcggtgctgacccttttgtacagcctctgccaactctgcccatgatctgatagcgtattatggtgcatcattaccatccgctgttggtcacgagtatgcagacattgacattgatcttttggtcgcgtggtataaccacggggatcgtgagtccacccggattttctcaaggacagtgacgagcacaggctgatgtatgtctccagctgccctgcaacattccgcgcacctgctgctcgacacgcgacttgctcggatgtcggactccgacgtaatgaatttggcggattcgcacattggtcaacgtgagtgtttgacgatgtttctagcaggatgaatctggttatcttattcgggttgcgtactcaaagtgcctgtcaatgtcgcttcgagcatgaagcgcgatccagtctcttgtcgcgcactaacgttgctaggtgctaccgctttgtccagatacacacttatgaagccagcgtgagtcgggctacacaccctggcttagctctgtaccgtaaaaccgacatattcttcgcagcaccctgaaagatattgctttgtcaatcatgtatatcctcaaagaaggcaatctcgatggccgtttggcttcaatcgattttgcgcaaaagggattcgacatttggcaggcatatatcgaccccgcggacatgcttcgatcgttgtttgatctggcggttatgaaggaagaagatatcaaggggggccggttgatggcgcatgcccgaacggcggttcttcagcttgcgtcgtccgcaggagcgttgttcatttcaaccgtcacgctggatattgtaacggcggagaccgttccccggcgaaacgcgatcatgaagctgtgcgtgtttatcgcaaggaagaagccgacaattctcctgccaagtctacctcgtttggcggaggccgtcgtcaagtcccttgatccgacgcgagtccgcatgcgggaatcaatccagcagactgcgacggtgattctgaatgagcttgtcagcacgtaagtccacgagcttagtccttgtcgctacatagctgacaatcaacactggcaggtttccctcgatcgactttgctggcgttgtacagaagctcgcagtcggtacacaggagggtgcagtgataatgtcagtggggatgtaacgatctttcgaagctaggtcggaactgatcgccgatgacgcaggtacgatctaaaaaccgcaactagactgtatgtcctggagacacatcatcatcccgtctccgcactctcgttctctccagacggtcgacggctggtcaccgcgtcgctagcggagcgaagggttacgatatggaaagtcggatcgagcttttccggatttctcaacgttggaggtcctcctcggcaaggttctggatcgggagagcccttcaaatcactcgactttttcgttgccgatcctggtgagcccatgatgttagtcgatatgctgttcaagtgcgctgctgatgcgagatgcaatcttagggaaagaggtagaccctgctaccgggcagcagaagatcagcttttcttggccaggagaccgtcaggcttgtctgcatatcgggcagatgaagttgacatttgctacgtgaaaaccttgtattgatgacaccgggggagttgcacatatgcagcataatgggcaattgtcgaatgaataatgatggatacaaaagaggcgatcatcagagacacgttatcattatcattagcgaatcatgtcaaagcccgattcgggagtatagagacgttgaaataaaacaagtgtccatgcacacgaagggtctgttaggctggcgatgatcgtacttctcgctcgctcaaacaagcgaggcgccaaccagaacaaatgccatcccggctccgatcacagagatcaggggttcgacttggtctgcccagctggtatagttgtcatcgggcccggcatctgtatcaagtgtgatcgaatcaatcgtgagcttgacggattgattgaacataacaagctgctgatgggggtacacacttcggaatgaggtgttgcccggatccggggcggtgatagtcgcagctccaccagcatctccgttaggggcagtagttccggcggtgggtagagtcaccgccgacttggaagtggagctggcttggatgacagtggtgacctgcaagaagagcgcacccccgatcaggtataaaactatggtcatctcgctgacgatcaagatgctcacgttgccgctaaaggtgtaagaaaccgtctggctactggaaagctgtcgtcgaaaagttcaataaaccggctgtaggtcagccttgtggggtaacacaacggcggaagtgagccagtgcgcaccgaatatgtctcgaacgcggtgctgtacaccgacgtaacgggcggagccgaggttgtggccgaattcgtttgcgaattcgatgcactgccggtctgactcctcgaattcccagtatcattgttcgagctggctgcctgagtctgagattgcgaggattgagtctggtcggtcaccacattggaactgctggcgctttgattgtcctgagcgagcaccgaggcgactacacagagtagtatagcggcgccggacagagatatacgcatgctcgagtctatgctgggtatggactgggcaactgctttgacggcgatagatcgtgactttccgggcagcggcagacgatgtgacacgaagtaagaggttgacgattcaatatagcgaaaagatagttggaaaggcgactttcaggagttttgtgatggcgggctgtgttcaggttcggaaacaacgaagaaaactgacaattctgtaatatgtgaggacagtcaaaaatatgtctggccggctagctcagttggttagagcattcgtctaatatcttcgggtgtataacgaaaggtcatgagttcgaccctcatgctggtcatcctttttgtcccggacttgcctcctcgatacaagcggacgccttttgcctagacaaatccatactctcttgtcgctgtcggaatcacgcccgactcctttcttttttggcctgtggtctgatgagctactctttgggaacaatcgactcaatcggtttcgtgtcgactttgtaaggtaacaggagcagcgatcggagtggcgggcatttcgatccagaccatgtggaacttgcgcacacgcgcatgaaagtgtggtctcacgtccagctacaaggccgccatcgattcccggtgagaacctcgtcaatgccgatggggtagttgggtacgctgtagattaggttgtagcagatggaaccatctcaaacaaatatggggtcgacctcattcaaactcaccgatattgcaagcagccagatcgctgcaattccgtgtccattttcacgactattcggtggttggccaaaatgcgcttgtagggtcacagccatcaagaccatattttcatcttcacagactaactctatccctctggtatgaccctcctcaggcagaacggggaaagctccattcacgcatcactgcatacctgtcctggagcaacaataccagtcccaactacactgtcaaagcaccaacagcccccaataaatctcttagcttcttcattgacttcgcagatgaacgggtgtgcggcaggctcgagttgggatcctaggagatatatagtgctcaggaggaatacatgttcagtgtggttatggcatgtaagttgtttgaggtcgatagagtaggtgcgttgggtagagcaggactggttcaacgactccagaagataagggatcacctacaacaacatcagcgatcgtctagttttcattgccagagaacgcacgcatatacgaaatctgccgatcatccccctctaattaacctcccgtttagacaacagaagcaaggatggagacgtctcagagagcccttccttgccgcaatggaccatccattctaggacttctttgaccactcaattggaatattgtgaaacaactggatcggatgcctgttctcatacagcggcccaggcaagatacccacacggtcaatactggcataagctgggttgaacggtgcagtattgctcgaggcccagcgatggtcgaggtggaagatgcagaatcatccctcaagtagcttcctgcagggctacttggcatttcacaaccttacctactcagcagcatgcgttgacccgaatattgagggtcttccgttgttcgaggatcggtgttgccccaccatacgtgctcgcattcttgaaaacggagtctgatcccaatctcggcagtgaagccatcgtgcaggtttaaagttgcgcggtgatggcttaaatacaaacccccagtcagtttgacattacccctaccctctctgagtcggtgtttccggcccctttgatgttgtcaagggttcaatctgccggatgatatggatcggcgctttcatatgtcggtatcagtcaaatcggagcctcgcttgaagagagcacttcaggcaccaaatgcggcggttgcggtagggaccatttatctgaaacaccgcatcttggctatgtatgggctggaactttccatctccttaatccactttcataaccaccaagattatcgctgccagcgtgaagctagcgagacgtttgtataaatatctgggattcagactagccaggccgagcgcctgtttgttatcgagtggttcttgtggccgagtcggcgtgcttgagatattggaggaaggagcacttagtcaagatccatcaagaacgtttataacgaggccttgtctcacccgcgtgtaagaagagctcaatcggtcgattgccgttgacaatagctgacgactgaggtgaacgtcccggttgggaatatcgcgtggctctcctggataacgtgtatcctctgccagggcgtccgaggagatcgccacgatctcgatcaatttggaaacccaatccaaagtcgggtccagagcctgcgaatccaaattttggcagtaccaactcaacgcgtctgtgtaagagctcagagcctttattgtgaggctggaatcgatttccccctcgtccctgcacaatctatgtgaccgaaacatgcgccagaacccgctgcacaggctcagatgatcagccacgactcagaactagtctcgagaacatctacgtactgacgaagccatgcagcgtggaaggcgacggttgaattttgcatgtgtgaccagcggcctgtgggttggctgcctccctccactgcgatacggaactccaaagtgagactgtccagaacattgacggcatcgtcgaccttccaggcggatggacacgcgtcacctttcatagtacaagcgttgcgccaacaacggacgactcgttgatccacgaaacgatatagccgcaattgctccagagggaattcgtctatgtagccctttggtaacaaattgcggacttgactggtatcttgccaaacgctgtccgacaatctcggaaggcgacctatgcgccggctgttcaaattggagagcagatacgtcctctctgccagatatctggtcgccaaaaggaagtgctcaacaggagtcgggcctgtgccgctgtcgatcgttcttacaaggtatagtataccttcaagcgaagcgtagcagttctcaggtcgacttctggcttgtacgagtcgatttcgtccatcccgtctagctgggaaaaggtgatagcctgctggagaaagaaccatgcccttcgattgtcgcttcgcatactatacgtcatgaaggcagcgatattggcaaatacgtgctcaaagcccaaggaggaagaatcggccggcatcccgttattgcgagtaagtagttggagagcggtcactgatgaatgcccacttcgagactgaatggtcgaggtttccattccctgggcgacacttaacacagacaggatgagaagtcgaaaccgttcgctcgtctcatgcagccgattggcgaaggcgttttcgatttccggctggcaaattgtgggcaccattcgatgtatcgttgtgaagtatcgttccagaagaaggccgacgttgcaccctgaaggtaaccactcttggacgtcgttttcaaggttgtcgcgagcacgattgttactttgcactgaaaccaggacctttcagagttatatcatccgatcgatccagacatgatattactgaccgtctgtactgcccgatccgatggatccctcggcttttccgacgtggttgtcttgctgcaagtctgaagagcgggactgtccatcactgagacttcccgaagttaaagtctaagcagttcacaccgtcaggggcgcaacacaccaggattaaggtaggtatgctcacgccgagctcgatcaaggccgagagaagttccggatcattaaagatcgatgtactggtgagccagtccagcgacggccccgcgtcccacgcaagtagctgatctgtcaggtcagtctgcttggcacctgtgtaactagccacaggaacgttctgaggagcgaccgatgcctgacgtgacatgtcaatagagtcagaacatgatcgattgttcgacaatggtcgggtcgcctgcgagatcaaagggctttgggttgacgctccgtcaccttctgcctgccatgcctcggtgcggccaaaatgttcttcggttccatgggtttgcctttcgctcgagacttcgtataggtgactggcagaagcgatttgcttctgggacgtctcgttgtcagcattatccaggctggggaacctgatgggccgtatctttctcgtctggatatcaaggtgagatttgaataggcgtcaacgatgattacaacccatcaaatcaccttgtgacgcgtgcatgcaagttcactccggaggcagggactacaatgtagacttcctggttgttgcttgcactgatcatcgttcatttggccaagttaactaatttcgcactggtatgctatgcgaggccgactatgcaccaaccttgattttgcggtggttacactgatcacacgccttgttcgagcggaatccagccgtgcgatccgacgttcgactggagtcctggtcttttggagacatgtctgattgagaacacgtcctcatcagctagttacacgatcgtttgcggtggtgctgtgtcttcaggagaggtcgagagtaagtattaggccgtccgcagcgttttcgagatcgatagatcgatcgacgacggtacgaccaagaaggccgacccggaagcaaatcgtttagggattgactgtgcgaccagatgcagcgaaactatgcggagtagaatcgaaacaagttgagtcattgctaatagtagcatagcactgtcagccattacaaacgctccgatgaccaagacattcaaagtagtcggcaaaataatacgtacggtgttcgaaccctgcctagtttcgctgaaggggtttggccggattgccaacggtgatgcgacgggaattcggcgggaatttgacgggaatcttagcaaggcgagagagcactgctatgaccgagcgatgaccaaggaggcgatcgtgtcaggagtggagctgaaccctatggaatagcctagcctacataagaccaaacttcgacggttccctcgagacctcacgaaaagaccgagttagtgtgcaaacgaatcaagccaccatccgagatataatgtccccaatgacaatgcagcgatacaagttatatgagggcaaaggcaatgactgcctgaggttggaagaagtcgaaaggcctgttgtcaagcgacctaccgatgtccttgtgaagatacacgctctcagcttaaacgcgcgagatcatcaatttaccaacgggaaatacatgattcctattccggaaggcggtgctgttgtgacttcgggtaagatctcagctgtttcacctccgcggcttaggctaatgtaggccgaactccatctgcacgttacacagacgcagccggtgaggtcgttgaggtcggatccgatgtctcactctacaagaccggtgatagagtcatccccattcccatgcccggcttccatcacgtcagttgccacgctttccctacatggcgactcgacctgataattgctcacatcttgaacccaaacgcagagcgaattcccaggaaagagctcgatacaaagagggattgggtttaccgacaatggcactgccagtggcaagtcctcgacgtgatccgcctacatttcacacccaggctcacatctcgcgttcctcggcacggaacagaatacatgattgtggacgaagaggatttagttactatgccctctcatatgacgtacgaggagggagccacccttcctatcgcttgcggaacagcttggaccgccttgtatggggcgggtaagatcctcaagtcgggtgagaccgtcgtctgcatgggtacgggtggagtggcagttttcacagcagcggtaagagggaaccgctccgaggtaggtggttctttgcttattgagccgtcctccccaatctagatcgctctcggtgccggtgctcgtgtaatcatgacctcgtcttctgacgagaaggtcgaggcagtccgaaaacacttaggcaatctggtaacttcaaaagaccgactcctcagcattaacagacggaagaatccggagaccgacaaggaggtggcacgcttgaccgatggcaagctcgccgacattctcgtcgaaatcggtgggatcaggactttacctgcctctatcagaagtgtgaagcagggtggtttgatagccattaccggatatttgagtgaccaacaggacgaagagggccccactgaaggtaagctgagagtcctctgaactcgaatggattgtttataaactgatcaccgtcgattcgtagatatcgcaaagctactcctcgttcatggaccggtcgccaggggaattctttgctgtaagcgcatctgttgatcaagacgttggggctcagcttacggtgtgtttgtacaggcaatcgagagcaaatgaagcagctgcactccgcctttgagcaaacccaattccgacccatcatcgaccggaccttcaagttcgatcaattgaaggaggcctacgactacgcgcaatccggtgatcatctcggcaagattgtagtcaaggtatccagcgattgagctgcacaacattagccagctgagacctgagaactcggcgcagataggtctttcctgccggtagtagaccatctgttgagcttagcatgaatatgaatcgatgcgcttagcagtctttcacaagctgtattgtggtttagtggcgctttctcacgactaattttcgacgcggcgatcgacgctctttcaatgaacgcgcgaccccaggaacacgatcgctggatctaccggaagctgtggctgcacagtgatttttggtattcgaactcgagtctcagctcaaagtccttgctacatcttggccaaggcatacagcctatacttgctaccctattaatatctataaatgcattgcatgcgttgccagtcgtgagaatttaagaggggtcgtggccagatcaaaccaaaaatcgtagccaaagtgatcctgtcatcgacgaacggtaggtttcgtcatcagcttcgtgtagaaagcttcggcaatctgcgctgttcgtcaacgtggccaaagaacgcgaaggaacgccacgtcggtctggaaagcgggtgactccttggtctctcagcgaatgaaatgagcacgaggcaacgctccggccgattgtcgatggcgagtcacgagctggacaatcacgggcacaaaataaccgcgagttccttctttccaatctcgtgggtgggtgaggcacggtttctttatccgggtgtttctcgctcggtcgcctcatcgggaccattgattttgaggagcccaaaccttggctctgctgcaccgcgtacgctgtacaacccaaaaaaaaggcgtgcgggggaattgacatcggatctcgaggggaccggcgaatctttctgggtggatcatgtcatgtttggtcccggccagccagcaatgtcgggtcgaacagacgaccggcccccctcttgtccagagttccccgcatgctacccccaagacacgtcgtcacaaagtctcgtccggcggttcattgtcgtcgtcgccattgttgcaagcgattgtcctccgttcaaagtcgcctatcgaccaggtttactttagaatcgatacccatattcataaatgcgcccagatattcgatcgcaacctacaccgttaccaagggcgagtgtatacgtgactgacaaggccccggaagctgcttctaatcgggctcggcatgatgaattaccctccgcaacgtgacccttgaccgacccaccctcgcgtcagtagcgccaggtccaaagtagcagcaatgatgcgtggcgtttctcttctccctcttcgagatgcctcgctttccctttacctcgccgtggccgcctggggcgcgaacaaggactgggttcggttcggaatgtttgatgtacggaaagagattgggtaacacgcctaggagctagaggccgctctggccgatccgaacgaggggaaagggctggaaagggaagaagggctctttttcgtatgcggctccgcgagcctgggtcgttcgtcgtcgtggtggatgggggtctctctgcacatcctcgtcacacccaacctaccacactactatcccgattgtatccctgatcgtcacccgtcctgtccgatcgatacggccattctcacgtttaccttcaactcgttgctagtcggatgcagagtcctccttagtcggagaaacgggtacagatcgtcaatatagtacgaccaaatcgaccggatcgtcacagccctgagcctgtcacctgcctgctccgttacgacaaacctcaaccaggcaagcctgtttcgactcctatacaccacatagacgctgcgaggattcacaagaatcactcaaggttcccttggctcgtgtgatcggtagcatacaacgtcccctcgttgcctcccgcagtctagagtcgaacaaaggtcagtcatatgcgaacgagatcggtcagcgatcaatctcgtcggcccggaaagaatcaactgtatctatcactcggattttgctgaaacaaggtatacctacccacctctgcaacttagtagcctattcggacagctgaataccaagagttcaaaggaaacaagctgagggtggattgacctccttttctcttgaatctcttgtcatccttggaccgctcttgatcgccggcatctcgtggcccgacacctgacacggatctaggcctcgatcccgtgacgacaaagaacaatagtcgaacctgaaacgttcgatcaatctttcgggttctttccgccgacgctcctcgcttcaatccgcatcacacatacagcggcaacattcttttcgacgtcgatcgatacccacttggtcctaaccggtcatcctttcgccgcacggggcacaccacgaggcaactaagcgagatcaagatcttttgatcagatcaaaggaccctcggggctgcaccaacgtcagtcaccgcctggctcccgatcagcctttgcccgggaatctatccaccaaattacgaagcaaaacaatacggcgacagcagcagaagcagcggatcatcaatttaagatcgatcagagatcacagaaactgatccacctcgtcgctgtcagacgacgaccaaaagaccgaaacgggtgaaaattgctcgcgattcatcatcatctctcctatccatcagcacgaaaaacactccgaccacacgtcctctttgcacgtagacgacggtacgacgacggcttcctttccctcgatattgtcatcaacaccgactcggtcgtacttgattgaagaagacacgccgaccaggatcgagataaaggagtaaccatctcgtctccgactgctcttctcgagtttgagcctcgacctcctatctgctggacgctcaacccgatatgagcggtcgccatcacagcattgtcggaacgggtcctttgtcatctgccaacccattaccaccaccaccatctgtacatccaccttccctgtcccacggacaatcccaccctcacggttcataccatcctcaccatcaatctccggctagcatcaacgccaaagcccaaagtcgacctcccacgggccgatcaccgatgatgcgaggagctgctgcagcaagtgggggtgctccagccggaggtggagctggagccgcagagcgagaacgtgaagcctactacaggtcggaagtctacgcccgtgagcgagaaaaggagcgggagcgggaacgtgatcgcgagaggggacgagagagagatcgcgaacgggagagggaaagggaacgcgagcgtggggaacgaatgagagaacgtgaccgggatcacggtcgggatcgcgagcaagccgctcgcagtcagcagcaacagcaacagcaacacatcaacgggcacgggcctcccccttaccacccgaacggtcatcccatgtcccatcctggacctaccactcgacacccgctcgacatgtcccatggacacccctcttcccacttacccccgcctcctcagccgtctggaccgtcgtctgccatggacaggcgtgaatcgagaaaccatcctccccccccacctccgcctcatcatcaccaccatcaggttcagaaccccaggacgtcttcactgggccccaactctcaagggatggcggtacctacgggaggaccgccaggactcactgcggcccaggtgcatacagctatcgtgaagggcacggaggggcctcttcaggccctggctcaagccaacgaacaaacctggttattgatcggcaagtccccttcgtggtcgatcggatttgcgagcttttactaatcccattttactgtctacaggtgcggtttctgagcaactgtctgacacgactcgagccctcgttgcctacgagaacgccctccgtcacaaccctatgagtatcagcgctttgacccaagtggccgggatcgccaggagcaaagaggaattttccaaagccatcgactattaccagaggactctcaacatctcgccagagaacggagaggtctggggttctttgggtgagcatctcgaaagtccggctagctatgaacactgcattgatctgccgatatttttcaaggtcactgttatttgatgacggatgatctgcaaaaagcctatacggcctaccaacaggctctgtaccgtctgccgaatcccaaggtaagcatcagcgtgtcacatgcgcgtctctgctctctctccttactgacgcgggggtttgatctatcaggactccaaattatggtacggcatcgggatcttgtacgaccgatacggctcgctcgaacatgccgaagaagccttttcgagcgtcctccgcatggagccaggtgagttgcaaattgatcagtagcacccattcccaatgcttacaccccgtgcgttacccgtgtgcagactttgaaaaggcaaacgagatctactttagattgggtatcatatacaaacagcagcacaaatatcccgccagtctggattgcttccgatacattctcggtcatcctcctcggcctcttaccgaggtcgacatctggttccagatcggtcacgtctacgaacagcagaaagacgtgagcaggacgaggctgtcgcggccctcaatacgtccgactgatctttgcttcgctttatgcagtacggcgcggccaaggacgcttacgagcgggtcctcaaggatagccctaatcatgccaaggttttgcagcaactcggctggctgtatcatcagggcggcgcgagctttgccaaccaagatcttgccatctcctacctcacaaagagtctcgaagctggtgagtcgcacgctcacaggacgacgcccttgagatatgacgactcatcgcgcgtacttccgcagacccggctgatcctcagagctggtacttgctcggtcgagcatttatggggggccaaaagttcaacaaggcatacgaggcatatcaacaggctgtctaccgagacggcaggaaccctacgttctggtgctcgatcggtgtgctttactaccaaatcaaccagtacagagacgccctggatgcctattcgcgggccatccggcttaacccgtttatcagcgaagtctggttcgacctcggaagcttgtacgaatcgtgcaacaaccaggtcaacgacgctatcgacgcatacgccagagcttccgatctggatcctaccaatactacaatcaagacccgtctttcgttgctgagaaacgcccagagggatgggcaacctctgccacctcccccgcctcctcaggacgttcatcctacagcttacgcatccactgtcggcggcaggccgttcccggctcaaggtggacctggcggacagcctccatacgagggacctagcgtcggctcgggacctgatggacaaccgatcctgagcggccgcgaccttgccgctcctcctccgccccagatggcatcactccaggagagtgccttccgaggtggcggcggaccccctcctctgcagctcgatgatgcgcgaaacccggctgcacgacgaactccgcttgcccctatgactatggaccgtacgcccaacaacgaggccgcccagtctcgagcacaaagtcaagtgcgatctggtccccctcccgaatctcaggaccgacgacgaggaggacgcatgtccccgccacccatgcacaaccgaggcgacgctcgaccggtcggagcctctcatcctgatgccaacggctgggacccctactatcgacgtgaggccggtgacgagagggaagcgcgtgatgttcgcggtggtaggacagagaagccttcaggtccggctccatcttcggcttctgtaaggggttctcccgccccctccgctgcccggggatcacccagcgtgatgcgaagttaccctgtagcaccttgggaatcgcgacacgagcccagcgaccgtcgtaccccgcttcaagagttttcagacaggcgggtatccggaggaagtgaacagcgaccggcaggaccgctcaatggtcttggcaagcgcggctccatctcgcaacttccccatctcgaagacgttcgtcggcatgaaggcgatgttgattctcacagccgtcctggcagcccgaaccgctacgccgcagaagagaaatacagagccgaacgagcttggcgagaacaagacgcccgtatgcgcgacgaatcggacagacggcctcgctacagccctgagccacccacatctggatcgatcttgaaccgaccagatggatcgagtatgcgaagtcccgcttccgtgcactcggccgccatgaccgaatccaccaagaggaagcgcaagggcagggcgactactccggacaagcaaagcccccgaggctcgacgttcgccagggacaggaagacggcagtcgagacgctcaactctccgatggcttcgcgacccggtgatgacgcggaaatgcgatcccacgccagtcgttcacgaccggtctccccgatcggtgccgcttcaacggcgactccgtctgccaaagtagcggcacccgtctctcgacctgccggcagagtgatcgacgaaggtgagctttgtcagggcttgctgggcgtgagagcccggtcatatactgatccatctgttccccaaacagattatgatgaaggcgctgccgacgcgctgatgggtctagccggctacaaaggtaccaaggaggcgaatggaacgtcttacattcctatcgctcgagcagtctccgaagcgcggactgaagcgactcctgcgatcaagaaggctgaaccgactcacggtcacaagagggccatttccagcaccgacgacgtggtcgattcggatgccaaaaaggctagacttagcagccctccgaaggaaaaggcgaaatcgcccaaacctgcatcgccagtcagcatcgccgctgaacctgtccccgcttcggaaactgctgcagcagcggaggtgaccgctgaaaagccgaaggacgctgttgtaacgcaggacaaggaagaggtggtcaaggcgcctagccccaagtcgccggagcccgacgtcatcactgaggctgtcagcggtaacagtattgctgtgcaaggacctcctgcagtagtcgaagcaaaggtcaaggaggcttcgtcggaagaggcacctgctgcaacagacagcgccgagaagactgctccgattgaaggcacagctggaggccccaaggacgacggttcttcatctgctgctgctcctattccggtcacggaagcagacggatcgaccgtcaaggccattcaagaaactccggccatacccatggaagtggagaccaaatagatgcatcgcgagaacggaataggatagggaggtgtcgtcgaggtacacattttcgtgacgatgatcaagctttcgacttttcgcctccggcgatcaaacatactttcgatttgttgtagtattcttatttattcacttttacggtttggctatgatatcatcttggatcttttctgcttgtcgataatactgaaatgcttagagtcacagaaaggtcgtgggtcgttaagaagatgatttgtttccgacagagcgtttacacccggatcgatcgagcagcgtcgtcctcttcgtcatatttctcagtcggacatgccatgcatcctctccataaggccataagctatacatcgaaacgaagggcgaatcgtttcaactctttcggacaggagtagctgcttgaccgagactcttctcaatatgacgcggtcatattgtactatggtccgacccagcacaagactcgctcgagctctgctggttcacaaacggagttttcacccaccgaccagtgatcaaggcaagaccccggtagctctacagaacgccgccgacgaggctttccatccaccggcaggtacagcccgattgcgtttcgctccatcgcctaccggatacctgcatttgggaggtttgcgaacggcactcttcaatcacttgtttgcgcgaaaatggaagggcaaatggatattgagaatcgaggacacggatcgggtgagccgtctatcttccggtgtcgtagccggagaggtgcctgatagaactccgaacgcatcatagaccagattggtagatgatgcgatatcgtcattgcaacgcacgctggactgggctggactcgactacgacgaaggtaagctgaggatgtcggttacccgtctcgactaccggattgacaccctataacgaattcaaagggcccggtagaggtggagatgtcggaccctatatacaggtgatacgcgacttcggaacgacgaaccaagagtgtcacactgaggcgaagtggttttgtatagtcggaccgtagagatatctacaaccagcacttgaatactctcctggatgtgagtggcaactctatacaggcctctcgtttaccagtctgacggcttgaaaactttgcgctttgatagaaggaccaggcgtaccactgtttctgttcaccggacgagctctccgagatccgaaaatcccagcaggtcaaaaaggccacggcgagttacgacggacgatgtcgccacttgaccgaagaggatgttgcccgacggaaacgagctggacacaagtttgtcgtcaggttcaaggttggttccgtccagggaacttgatcagtaccgacgcgggagcttactcgagggtggtcattacaggatcctgggaataaccctgatctacctcccgatatgattttcggcgcctactcatcatcagccgcatcatcatcatcatcatcgtcgtcgtcatcgtctgcgtcatggtcgcgacctcaacttcccacctcggcgcttcttgcgccaaagacatcgtcgacaagctcaataatccaagccaaagggttccgcggtcctggtagcttttccaaccgggacaaggatctggatgatttcatcttgatgaagggagatggctatccaacgtatcactttgccaatgtcgtcgacgacacgagcatgggcattacccatgtgtttcgaggcgaggtgagtcgagtcaagaccttacgggtaaagttggcttgtctgctgacatcatggtttcgtgattctgccccaggaatggctaccatccactcccaagcactttcaactttaccgagcactcggatggactgcgcctcactttgcacatcttccgctactcgtcaacccggacggtaccaagctgagcaagcggactggcgacgtcagcgtcgaaaactatcaggtaagggcgtgatgcagcaggtcccctgaacgatgcgtgaagatgtgaggtactgatatttgacatcgatcggaacgggcaatccgctagcaaaaaggctatgagccttcggcgttgatcaactttttatcgctcatcggatgggaccatcatcatcctactaccccgacgacgcaacaaccgtttttcccgacggaccctgcttcgatcggggatccttccgactcttccttgacctcgggcttggacatgactagcgtggaactgaggaaggattacaattcgttttccgaactctacacgctgccgatgttggaggagagtttctcgctggaacgggtcgggcgaacgcgagggagcgtgtttttgggcaaattggattggctgaacaagatgcatttgaagcgggcgggattgactcaccacggggctcaaggagccctggatggtggcgcggaggagggaaggaaggggttgatcagacgggtcaaggggatgttgaaggagagggacgtctttcagggatggtaagccgcaaggacgaacatgtcgcacgtgtcgatccggactgattccctttcatctccttacgacagtgccaggatcgaagatgacgaatttgtcggcagagttttggacattgagctggcaagtctagtcgattcgatgacatcccactgacgggcgacgggcgatatccctatcgagacgcggctggaactgacttgattctcccgatactgactgacgatagccccgagcgacggtcctctcggatattcccgcgctctccgtcttcttcttcctccgtccgcaaatggccaactctgagacgacgagcatgtggaaagagtggtctggatcggggcaagggcgttacgcgcacgtgatcgagcgggtcaaggcgaggttgctgaatgctgccccctccgagggtcacgagacggaggaatggatggacagagtgatagagggtgcgaggggcgaggtggggatgaaacgaagcggagtggtcaaggtcctcagacacgccttgacgggaagaaaggtcagtgcagtctctgctcggttgcgatggatattcttgtggagctgacgcgatcgtgagtggggtattgggggcgtgtttttagaaaggacctgctatcccgagcgtcatggccgtattgggcaaggatgaatgtacgcagcgactttcagatgtcgaaaagtggctcgaaggaatgaagatgtagacgtggacaggcatatagtagtgtagtagtgtgtagctatagtcatagtgaaccatctctttcccacttctcatttgcttccgagagtttgatcaacaaaagcgtcaaagggaggcagcgatgcagggtgacagggacagggacagggagacgaggtaggtcgatatcatcatcatcatcatcatcaccatcatccatcatcgacatcatcatccaggtcgggtcgctctcttgcttgacgttttgtcatcccataccagttgacgtccacgtcgagtcaatcacgtcacgtctctcttgcctctagtgagactgcacaacacgcctggtgatctggatctggcattcccattgccactccacccctttgatcgacaagaagctcgaccagcaggacgatatcgatcaaggatcaggtgagcgacgaactccacaatcgatacgctcggcgcactttggagctgattggatgcgtcccttcatgtcagacagactcgcatactcgaggactctcctcacagctcgtccaggctccatattcttgatcgatctcgtcgcaaagccttccactcttcgactttacgaacctaacgccatcaaacactcatcacttcaaagtcggatctacaagattccccgtcgtgatccccatatcggccacttccgacacccacacagatgtcacattcaaatcctccttctcacctacccacacgtacgccttccccacaaccgcctttgaaccaggacgggtacacttccaacggtcgaccgacttcccaaatcctgtcgaaccgccaatcgctcgccctgcccttacagcaacctaacacggtagggacgacttccaccgcgaggttctccacgggaggcatgttcgggatcagccagccgggagtgacttcgggtcaatctctgcggaatgacggaggcgtcatcagctcgagcggtgggaattcggacaacgtgggacaacagcagcaacagcagcagcagtatgcaggtgcaggatcttacgcgaacgaacgtcctttgaacacggccaaccggcatgtgagtctcgccgctgggatgggcggtgggtcagggtccacctcgaaccaaggtatggggattggggggatccaacaacagcagcagcagcaaggacaggggaatggcaacgtcggcgaccgactagcaaacgcccgagccgtctctcctcgactccccggatctgccggaccggggtctaaccagttcccgacctcgtatgccggtgggaccaacgggttgttggctggctcttcctcgactcaggggttggggggtttgggactcggcgctgcgccaggagggagaagtggagcggggatcaggcccgcgtccgagtatctcggcggaggtaacaggggacagaggggaaaagaagcgagcccagagagtgagttttacccacccccagcgtcgtcgtcgcccagaggtttcgactgatcacaaggtgcttctccggactgatctagacgaggcgatcgagaactggttcaccgacctacaagcgtacgaggctcagctggacgctttggcttcggccagtatggatcaaaactttaccgacgagttgcaggccatcgagagctgtgagtgtcaatacggtcgcacacgagcgtcggacactgtggcgtatcgcgttgttgatcgtttctttgtctacgcacaacttagggttccgagtcttgtcggaaaacgagcgtacggccgccctctactcgttattgcaacagtccactacggcgcaggtcaggttcttccaaaaggtcctttctcaaatgtcccaatccgaccccgtcagcgccctcttgtcgcccgccttgggaagtagcatgcagaaccagcaagacggttcccggttgggcgctacgcccaacctcggtgggatgggaggactgaggtcgcccggtctgagcacgagtgccggattcccaagctcgcctcaggtcaatcagttcctcgctcccgatgctgccgtctcgcaggagacgtttggatcgccttcagctcaactcgccgctcagaggaataggatgaaacagaatcggatctcggcaccagggacgttgcaagtgtccgaagctgggaggtttttgggcggacagttgaacgacgtcatcgagagggggagcagtccgggggtggacagtaacgcgagcaggagcccagccatgggtgcgacgttgggtgccggtatggactcgagacccaagagcaccgatttcgctgggatggccaatgtggctccgggctcgaggagtcctcgtccaaacaacaacggcaattccggcatggtcggtctcggcctgcccaacactggcttgaaatcgcctcgcttcgaagatcagttcagtcccatgctccagggcaactgggcgagtctgatgaacaccccgatgatgcccatgtttggcgacaacaacggtcaaaacatgagtcaggccgacctcgcggccgcactaggcagcctaggtatcggtggattgggccagcagcatggcggtaacattgttctcgacgatgctgccaagttcaagcgacgacctcagaacgcggtcgtctacaacgacgacggagaaccgatcccccagcaacagcaacagcatcagactcgtctcgaatctcctcgaccgggagcgggattccaggctggcgattggagatcgccaatgacccagcaaggtgaattcgcaagcaacgctgggttgcagggactcgccggtttgggtctcgctggcggcatgggagggatcggattggacgccggtaacctggcgggactcgggatgggcatgggcatgggtatcggaatgggcatggccaacatttcgcccaatccgatgctcaactcgaccgggttcgctggttctccgggcatgtggggtcagggaaaccgggcgaggagtcaaaccgaacgtccgagaaagagccccttgttgcgtcaaggagagaaacccggtgctgggggtggagccggagcgggcgcgggtgtcgctggagagaacgatgtggacgagagggtcctcaaggatgttgcatactggctgagggtgctgaggttacacgtgagtggaagcttttgccctgcttgagacgcgggacaaactgaccggtgttgtgactatgtcattgtagaaatacactccaaacttccaaggtgaaaagtggcaggatatcgtctcgatgaatgatgccaagcttcaagacatgggcgttgccgctctaggagctcgacgcaaattgctcaaggtatgtggggttccgtctcgatggcgatagtctttacccactgacctcgcccacttgcataggtgtttgcaaatgtgaggagccattacaagatcccccatccggaaggctacctcgaggagctcggaaccgacgacaaggacggcaaggacaaggacggcgacgatcaagccgagacgaccgccgacaaggaataaacgagttgttacgcacgagcatttcagctctcgacgatcacgagtacgagtatggcggcgtatctgccagtcgccagaacaaatcacggaaatctcgactttttttctttctcattctgcgtggtgctttcgatgacaacgaccggttcccaggggtttctgatttctgctgtgcgcgattcggttggtcgtctcggttcatgtgtcaagatcatctatgtacatctcgagtgccaggtcattttgcaggatacatatttatgtatgacgagtcttttcatcaagcataatcttcgtgtgtcacttgagacgttcgtcaaagttcgtgtctttatcgttatgatcatctctcggctactcgtcttcaaccagtactcgtccaaatagccaagacagtcgccacagccagaagagccgaactgaaatgactttgtccagatgcgtcgttcctattcctcgcagtctcggtcgtttgggctgtagcggtccctactgccacggaagccgactgaactgccgacgagtagctgcccgcgcggaagtgaggccccggtagggagggtcaaccacgaccagggctgaatgcaaaatcgatccgactcacgccgaagctgcggctgctctattgctgtccggattcgcgagaaacttgtcgatcacgtggatgacccctacggatcgaaagttcgtcgaccccgagttgaggagtcagcaggaggtttctgctatgacagactctaggtcccgcttgagactcgccgttgctcgtaatgacatccgtgcggaggacgctggcggtagcgttgtcgttcgagacatagatccccgtgtcgttctggaagaaatcgagcgtctcccctcgggcggtgatcagggagttactgggcaagagggtcgaagagtattgaatgctgccattgattatctgccgagcagttcacgtagcagggtgagccggggaccgatcgtcagacaatgcggatgtcagcgagagaagacgagctgacgtggttgaagagcatattctcctgcaatttcctatccttcccgctcacggctcccaatacccccgctacgtcctcgtcgaatgtcaagaacgcggtgatcccggtcgcattgttaaacgtcttctcgacgtcgaggacgttgatgagcgcacgagcgatggtcaggccgacaggagaagaagagatcaccggctccgagagggtcgtcaagaagggagaaggaaagggaatgatctaccggcgtacgaaacccaaaagcgcgcccgtcagaggtcggcgttccgacgaaacacatgaggcagccgcaatagactcactcggtcgaccttctggatcaacaagttttcccaatcgattccctgatcgacggtactgacgttccacgagtcccccctgatcaaggctcgctggcctggttctccgacatcttgctccaggacgagcacctgggtatccctacctggcagtgcaccgtagatctgatccaggctggcatcgggaggctgagtagtggagttgtgatagagcgtcgagaggatcgtatgggagcggggaggggcgatctgagagatcctggtctttcccctggtgatctagaagcatagccgttcagtctgaaatcagaacgagagcgctcttctggtgagagcggtcgacgctgacatggtacttgaacacgtcctgaagccagtagacgttctctttccggatgttcgagggatcaagtccgtaccccttgaaagcctggtcagtgggcgcaaagatggtgtattcgtcgcccgagtagaaggaggataggaaagtcttgccctcgtctgtcgattcgattctctccacggctgcgaggttgactgctcagccagggtgattcattccgttttcttccattccaggggcgactcacctgatcccagcgtgatgaggtcctcatcgaacagctttgccttgagtcgagtgagatactctgcttgatcgacccgaggcagagctcgaacgcaaggccagacgacgcaggcgactttgatgaggaggacgaggtcgatatacatgtcgactagctacccaggtcgaaggaacgtcgtcctacgctttcccccctagtacaaggtcatggttgtcgacgtctctctcttgtccaggatctaaacggtttccctcttttttgttctcacactcttgtcatttttcgggtgaaacgcgtttccaaagtgaaatttgattccgcggatcgtagtaaacacagaggggatatgctacacgtccgtccgttcttccacttgtcatacggcagagtggatgatgtgtcatatcatatacatctaatgcgatacattcgggaccctggcatccgacaatagatgtccccgtgcgacattctttttgtctcccagctacttccccaaccgagcacgtcgaacgcgtcgaacccgggggccaagtcggtctgacgacgctcacgacctcctcaccgccatcggcgctttccccaacccttgtccctttactttcccctttgtccagaacaatctcgctagcatgatcgacgtgaagaacgacagcgagaacctgtaggatcaaccccggggggccgaaaacggatcgaagggtcatgtcagcgtgcccggccgttgggactacccgaggtgcaaaatcggacggggaagacggaaagggggggtggggcgactgaccatgttccagcgtacatggcatgctggttacgtagttccacggccaacggtcgaccgacggggattccctgttgaatcaactgggaagccggtgtctctccctctattcccgattcagttcgatgcagacgacaaggacgaggacgaggacggtgtgtgatcgaagcttcagcactgcgagcgtttcacgtgtaccgggcactcaaactcaccgtagatctcgtctaccaagacgccctgaaccttgtcgacccccttgccctcgacccactctttcatcgcttcgagatcgatgtagaaccactcgttgttctgcttgttgttatccggtgtgaacgccggtttcgcgcccgccttgatctccgaggggggacggaggagtgtctggatgtacaactcgcgagtctcgttggagatggtcggtacggtctctgaagacgtctgcaccgaggggctgtacaagggtacgagcgccgggttggatcgatactcttgagcccgggcggtggaaatgaaccctcggttgacgaggatcggagtcatctgtccgtcatcgaccgaaccgtccccgatcctcgcgtcgagcctgtgagcgtctttcaccgcgtcgtcctcgatcaggtcttcttcgtcgtcccgtcgccaaaaggaaaaggaagattgaggggtttctttcttcttcttgttcctcccgatcgaggcggatcggtcgtcattgttacccacgggggtccggataaaaggttgaacgaggtgataaccccctgcaccttcatacacccgaggtccgacgagcatgatcggttgtgcaaagtgaccgtggaggatcaccctgcgaaaggcataatcggacaaggcttccgggctgtcaacgtctcggcgaaaggtaccgggggggaggggggtggtgttgtatccatcagcaaacgtcttgcggattagtatcaacgtggctgtcgcgccccgggtacccacttgatctcgttggggaggaccatcgggtctttgctcaagtttcgatcgacatcggcgatcaagcccaatttccacttgagacgttgtacctgccagacacccaggtacgccgtcaagagggggacacagcagaggaccgccgtggtaggtgtcaatcgaaaaccagatctcgaaccgcccgacgatgacgacgagccggacgacgacgacgagggaaaggtcgacatggtccgggatcgaggtgggaacgagcgggatgatcggctaggcgcggcgagacggtcgatcgtatgtcgccatgcaggcgatgtgcgggatcgcaaagtggccatcattgaggaggtcgtcgtttagaagctaccactgtgctgctataggcgacgatggatgtctagtcgtagttgacatgggttgtagtcggtcgacatagtagtgacatggtcgatggtgtcccccagtcacttctggagatttgcttccgaaaattcaaacaactatcgaagcagatcatcatgaatggtagtagtagtggtatctacaaccacttgcatctcctggacatccccagctagatcctcatctcgtacctgcaaacatgcccaatccacctgcgacgttgtatcccaccgcggcgacggcgctaccgtcgagaccgtacatcctctccctgaccccccacctcacctcgacctcgtcccacctcttgctctcccacccatcaccagagatcaccatcgtagacgctcaaacgtttcagctggtggacaagctcaagggaggtcattccagggatataagctgtgtggtcaccagcacgagcgccagcacggacgagatcgttcagggcgggttcgcgaatgagggtaacatctggagcgcagggttggacgcgaacgtggtcaggtgggacgaaaggtcgagaagacccggtcaaacgatcaaaggtaggccgtccacctgtgtcattgggtcaccgatcgctcccgaatgctgaattcggccccgccctttggcccttgctcgcagccaacatccgaggtcgaggactcccgcttctctccctggcggtacacgaaccctccaacctgctcgtcgccgggacggaactagtctcctcggaatcccacctcttgttttacgacacccgatccccctcggaacctctttacacgcatagcacgacgcatagcgatgatatcacctcgctcactttcctaccccctacctcgtcctacgccgctcccctgccgaaggagtccagctcggaactccctaccccacctctactcttgttgagcggcagcacggacgggttgttggccctgacgaaccctaaagaatcggacgaggaggaagccttttacggggcggagggactggacgggtccgtcgccaaagcagggtggtaccgcgccatggtggacgagccggacaagaagagacggagaggagcgggcaagcgacaagggttgaaggtctgggggaggagcgatatggatagcgtcgggacgtgggagatgggaagaggggagacgggcgatatcgaggcgagtcgacatggacctcacgatccttctcgtctcaccaaaccttgcctggactcgaacgctgaacccatctgtgtgccggaaatacagcttcaacagcccaacctccacccgactcagacgttcaaacacctcaccctctcacagaccgctcaatcgtctaacaagtcccacatcgtctcccaagacctcgagacggccgaagaagagcaagatcgaaaacggtccggcaaggtcagggtggattacctcgtcgacgtcatgagcaccctcggcgtcaacaagagatcaggcgaggctatcgctgccgtaggtagcaacgagtaagtccatccgagcccccccccccccgactcgcggctgaaaccttgaaccaaaaaaaaacaggggggacattgtcctcatgcatcatcgaccggggaaagaaggtcttggggattatcaaccctcgttgttcctccgcacgccccgggaaggcgagggagaggggcatcgggacgtcgtcaggtgcatgtggcacgacgtcagggtgagtttcgagcgatcgcgtgggcaccccggtagggagatgtggcgattcgaatctaaccccatgacgctacgtttcgttcacaccgacagtctcaagtattgtacaccggttcggaagacggtgtgctcgtcgggtggtcgctaccgtctctatctgaaatcaggaccggcgatcgggaacacgacgaggaccccggagatggtagggaggacgccgaatcggacgacgagatggacgtcgatggcgagggcgacgatgacgagcgggacgaagaggaaagcgacgaggaagaggtcgtgttcggtcgtcgtaggacgggtggcaagcgggaggccagcgacgtgttgggatcttcggatggcaagcggaggcgtaatgcgttttgagatggagcgaggcgtgcctgaaactagggaatgtcattggcatgtctagtctgttcatcattcccctcatctcgagtacagatcaggttcgcgaaatccgcaaatgtttcttccggcctcgagatccgcctgaaagagcaatcagcggtctgtggagctgctcccaatcttgcgcagcgcccgagcgagatggcaacagggccctactcctgaggaatacaggatctccagtaccttctggggcgcaggactggattccgggatatgtcatggtattcatgctaaactattatacatccaatctgcaagccagaatctcggcctgtcttaccgaattcggcgtattgtctctcagccaccctcaagcagtcgaggggatctgacgcaatatttgcaagacttcgccagcctggtgagacgccagtgtatcgacatcggtgtgcttgatgtaattgagaacagttctggccgattggatcaggtgcgcatcgacaggagcgggagggggattactcgcagaaggcttgatgtccaagcgaatttccggttgtgacgtgatttggccagtgttctctgcgatggccttggcgaccgagtcgaacattaggccgagaaagaccagggcggctcttcgcaatgcggggtgtttactatcgttcgtttgtgtaggttcgttattgttccgttgaatgtcattttcttcttcgtcgtctcgatcgtcgtcatcagcttcgtcgtggggtttcgtatgtttaagttgtgtttgggtttgagagacgctttccaagcggagcaggtccaagcacgagccgatgaggtcgtttgaccacggcagcagtgctctccattcagtgtcggcgcaggtcgccagtatcgagagagaagagctccgtatcacggttggcaaattcgtgttggggaaaaccctcagtaatcggggtacaaccggttgtactgaacaagtgaagcgaggtcagctcagtcctcgaggtcctcacgacgattcgcaaactgactgtatcctgagagggctgaacctgctcttcgaacggattgttgcaatgcttctccgagacgcaagcgcctgtccaactcgtctggtttgaaatcggtcatccgtccaagatcctggacgtaagccagcgtgatgctcgtcatgacgtcccgtccgagtccgtctaccaggcttgacagacccttgatcgcattcaggtacatgaaagaatcgtcatcccggatcgccgagaggaagatgtccatgatggctggcgtcagggcacgatcgaaatcgggggcgcgcacgatactttgaaggatcatcaagccgtgtgctcgaacagccaagatcggatcttgaagcagctttagggactcctgatagcgctgagcggtgtccgttgtcgaagggcttgatacgtttgcaggtgcagcttttctgacggcgagcagcagggatgctgatcgtgcagcttgacggacatccgcagatcgatgctttaccagatcttgcacgtgcctttcgattggcttgaggatgggttgagttgcggggcttatgctagggtcacctgtatagtcgtccattgagcgaccgaaataccgcgaatcgggacacaaaagctcaccatgcaacgttgtacatagtagattcagcgccgtctctaccaacccaagattgggcacgtcctctttggtaacatcctccaccgtggcttcttcagcatcgtcagcgtcttcatcgtcgctgtcagcgccatcgtcggaatccgccgttccgttcgggtctgctggagaggctctcaaggcgtgctcgatgaataacaagacgtgccgcacttccttgtccaggttggtcgaagccttttcgctgagacgcatgatgacctgcagcaagagtagatttcgcctgtcgataaagtgagcgttcggcacgccccttgcctgaaaaaatgttttggcctactctgggttcgtatcactgtcatcagacagagcttgatacgcttgcaggcacttgacgaagaaacggctcatcaggtcggtcctggccgatctctcaatcgtggataccagtagctccgggtcaggatacatctgaaggcccgagagatccggcaggacgtcgtagtcttcctccacatctgttgtctttgtcctgtcggtgacgtgcgtatcattcaatttggtggccaagtcgaactgctctggctcgacattggtcttcaaatcgtccatcgtgggctttggaggtctgataacgagaaacgggttagctaacagcgttcgaggcttcccctcaggcgatatcgacgaacatgccgtataagaccgccactccggtttcatcgtcgcctgtgtcatcttcctgggcgacggattgaccccaaaacaggaccatttcctcgtcatgcatcccgcccccgaaaccaattcctttccatcctcttccaccttgaagcacttcccacaacgctctctcgacgaggtcgacgtccatcagcctgacccaggcaccgatgacgtcctcgatttctttccgggtaagcggatccgcggttttgtcctgtttcaagtcttgccacaacaagaatagaggcctgacgatgggcgtcaaggcgaggtcaagaaatggtggaggtggtgggttgagcgtaaggaggggaaggaggagggaaacgagagagttgatccgcgatggggtcgtgaccacgaccggttcttgggccgatgccgagtggggcagatcctcaagccgtggaaataggggttcgtgcagagtctttttcaagctttgcttgatcaagggcgaggtgaccgacaaccgggtcaggacgtatgcggaagcctggacgtgatgccgaggagtattctgagcggttatggggtccatcggtacgacgatcaaacgcagctgttcaaaaatattgttattatactcctgcatgggcagttcgaggcagatgtcaatgtcttcctcattgaagtgtcccaaacttagccaagtacgtaccttggattccatcccatgtacagggatcgacaacaatttcgtaacataatccagcttgtgcagctcgagcactatattcccggaagcacgaccgcggttccccctcagccccgaccaaccgacattccaccgcaatatcgtctcccactcaccatcatctcccgccttgccatcctttctctgtccgattccaaagacgttccccaacaacccggccaccccaccaggtcgtaccatttgcctccccatcaacgccttgacggtcctcctcgcgtactcggggtacgtcacgggttcgtcctcgagcgcgacgatcttggccgtctgtcgttcctttcccggtttactcgtcaggatggtttgcagtccgccgagcgccgagagggattcagagggggcgaggccagagtcgatgtattccaggaatgttctcctgatcggcgaatacgtggcaggggggaaagactgcgaccatcctaatagtaacggagggaggaggatgaagggtaggattgtcggtgacgataggaacatgtagaggtccgagcgttgagcgtctggtgcgatatggatgaggctcagaagacgagaggtcaagtcccgtgtcgactcgagggtggtcgaattggtagagggcactgatccggtcgagacgagtagtaggtcttcgatcctcggcaggacaagtcgactggggattaatgatacgagacgctgcaggtgtctcctctctgtcaggtcgagtaggactgaggggacggccgaattcggtaagctcggatgacaagggcaagcagacggtacatcctagacttgcattctttaggatcgatggccagtgccggatcttcccggagtctgaaccaatctgccacggcttcgacaatgttcaataccctcgaaccactctctttcaacaggtccgccatatccccttcgtcaggctgctcccacttccaccggtccttgagctcgtcgtcttcgctcgctgctaggcgtttcgtggcttcgtctaattgcatgacgagatctgctcgtttccccgagagcgtattgatggcgggctgagtgctaggtaacagcgcctgaccgatatggagtgcggcatgaccccaagcgatagctctgtccggcgagttggcagaccgagtcgagctcgagcctggcccattatcgtccagcatttcgattgtttgaaattgctataatttggaggtgctagtcttccctacccctgacttggctatactaccgaggaggatatggtgaccatgaccttgacagagatgactatgtaacaccagtaacttggtagcttggtagctgtacgacgctctctccatttccaaaatttgcttccgatcgattcctcagatctaagcagaggattcgtcgattcgattcagttaagttgttccttcttgacatgtatcatcagcctgcatacgtttgaataacaaaagagagcaagcagacagtaaaggcccatcaggcaagtgctcattataaaactcggcctcacgatggacaaactcgtcaactacgtcccggcgtcgtttcaatcctttccggcctacctcgaacaccacatcctccacgcgcgcaacccatggtcattcgtcgaatattaccagaatgctccggatagcatccacaccatcatgccattgttctggatcagcatgaccttgacctacgttctgggcttgatcacgggcaacgtgagccagatcggtgagttcggatctcaagacgtgtccgggggggacgaaatctcgattctgacgtcattcttatttcttcctcgacgccgttgatctcttctgatcgtacagatcgacagtggacgttcttgcccatcgcgtattccctacactttgtgctctatcctctgttcaatacgcacggagatgtgttcatgcacaacctcccgaggctgtttctcatgtggggtctgatggtacgttcgaggcgcgtttggttggccatcgcagcgcatgacggtctgatccgatccacactcacttgtcctctaggtcgtttggggagtccgtctgaccgcgcatactgccagaaggggattgtacaacttgtacgtacagacgagatatcattcagatacccgccgggatcacccgactgatttcgtgggtttgtgtgacagctttgatgaggactatcgatggcagatctggagggaccagctgcctgcttggttattccagctgttccatctcggtttcatcggtaagctcgaccgctcggattgaaatcgatcttcactcgctgatcgtcggtcgtgaaacacgtagccatcgctcagtcgctcttgttagctgccatgtcactgccgtatcaccacgtgctcgtcacccctcgttccgcccagcccagctctagtctgccttttggactggtcccgagtgatctcatcctcgccggtctcaccctcctgaccatctacacccagttcatgtcggacaaccaacaatactctttccagacgtacaaacaacacgtgaaaaagacctcgtccccctcccagatcccgcggacgatctcgacctaccgggaaggcccgttcgatctcacctggacacccaaggacgcccagagaggcttcatcaccaagggtctctgggcatggtccaggcatccgaatttcgcatgcgagatgacgttctgggcgttgcaggggttgttccccttgctcagcgttgggggcaggttgaccgaagccgataaacggggaatggtcttgcccaccccgatcatccctgccatcgccgtgagttcttcccgacgtcgggtcttggtgcatagcgccgcccagggtggggaatggtcgctgacttgacccgttatctctgctcggcggctgcagtattcttgcttgttcatcgcctcgacctggtttacggaaagcatcaccagtcccaaggtgagtaccgtcgatcgggcaatgctacccgaaatcgagctgaccttgatctcccggaccgtctcagtacccggcttacaagtcataccgcgccctcgtgggccagttcgctccccaagtgaccgtcttcaagggggtcgcctcgttgttactcggcacgcgttcaaagctcgccgaggagctcggatggaccgggaccaaggatggcaagaaggcgcagtgatttccaaggactagtgtacgatcgaggataagcgtatggtctgtacaaatcgagagtcaaagtagtataggaggcgctccgaccgcggaaacaggtgtctgcagttggaggtgttcaacgagcttgtcggcgaattgttcggtgtcaccagattgtcgtcggaatatatgacaagaattgtgatgatcccgtgtttgggatcactcttgttacgatccactattcgaggtttcagggtgccatgccgtgctccaatcatacgaggtattgactcggtcgccggccgttgcgatcatgctcgagtcatgattgtatcatttcttgtagcatcgtcgtgactttggatcggtcatatccgcgaagtcccgtgcgtgactcgccacgatccgaggtcagaatgcaccttgacatttggttgatatacccgaaccgatacttggctatatatgtcaacgtgcgaccatagcaagtccataacattccacaagcttctctgctcgaaccaccaggctcgaaccaggaaatctatcgacaagacatgacgactatggccacgaatcaggtcgcgtttgggcgtgcgatgcgtgacgagttcctcttcgaggatggatggactaacctgaatcatggcacgtcaatcgctttcccttgtttatcgggactgttgaatactaacgtatcttactctcaggctcatatggaacttacccgaaatccgttcgccaagtcctgctcgactatcaactcgcacaggaatctcgcccagacgagtttatccgttacaagtcggctgccccactcgcccaggctcgaaaggccgtcgccgatctcgtccgagctccgcttgaaagcatcacttttgtccaaaacgctactaccgggaccaatacggtgcttcgaaacctcgagtacacccagggcgatgtcatcctgacgtgcgaaacgatctacggagcttgcgacaggaccgttcagtacatctgtgagacgaccgccgccgacacggttcactacgtgttcaaggaacccatgaccgagtcagacttgatcgacggattcagggaaaagattcgtcaggtgcacgccgagtctgatggaaagcggcgggtcaaggtcgccatcttcgacacgatcgcctccatgccaggcgtgcgctggccatgggagcagctcgtccaggtatgcaaggaagaaggcgtcttcagctgcgtggacggagcccatggaatcggtgcgatcgacctgaacctgggagagaccgacccagactttttcgtgtcaaactgtcacaagcaagtcgagtcgctctcgtcctgtcccatctacgcccgacgcatgttgtgctgatggctacctcgcttacaggtggctctacgttcccaagagctgcgccatgttctacgtccccgtgcggaatcaacacctcatccgctcgacagtacccacatctttcggcctgatctcgaaagacagcacgaaacagggcccacccgtgcccaggccgaccttgggggattcggcctttatcgccaatttctcctattacgggacgctcgacaactcggccatctattgcgtgcccgaagccatacgtttccgtcgagaggtttgcggaggggaagaagctatccgcgaatattgtcagcggctcgcttgggagggagccgagattatcgccgagaccttggggactcgattgctagaggtccctctgaaagactcgcccatggccaacgtcctactccctctcgaattcgacggggagggaaagttgatctgcgacgctcctgaaaagtctggcttgacctcgactgcccaggtgtggaactggataggtcgagccatgacggaacgatacgatacgttcatggccaacgcagcgtatcgtggatcgatgtggctcagggtcagcgggcaaatctatctcgaacgcgaggatttcgtcaaggccggggagatgttgaagacgctgtgcgaggagatccgggcaggagccgttgcttcaggatagttgtaaagatgtcgctgcagccttatcatcttgttcgcctagactacgtcatgacgtctgttcaccctcggcacctaagtaaagagcctcacgagccgttccgaccagagcaagctagtctggccgtcggcgatcgtccttgttgttgacgatacagacgcgccgcccacaacaacgtacccacgccgtcttctcttcgggtgatgaacgtcgagatcctcgtgctcctgtctttgttcgagactgaagttataatcccgtcgctttgtggctcttacggggcatgatggctctccgggatccggcagcgaaatgaggttgatcagtgacaataatacagctccagtagcatgaagatacgtgaagaatgatcttgagtctttgacgccaagctaaacgctcatattatccttgcaaagggtatgttgaagcttcaattgctgacgattccgtgggatgggcagagaacaattcgagccaaaacagatatcgatcgtctaaggcggatctcgcatgacgagcaatcggaaggatccactgaccctatctcaacagtagcgcgcttcgcttcaaatcggatcggggtacggagagcatcgaatcgaagaggctaggtaccgacctagcactggttaatgggccgagtacccctcttagatgaaagcgagatggagagttgatgattctcaaccttcctcacactactctcgattgttatcgctcggaagttagaaccgatatgaaaattaacagctactaccctggacgcgctagacgacgcaattgccccgctcttttggatagagctgagcattcattccccatggcccaccgctcacgctcgtgaaggacagcctggcgagacattcgtgataaaccctggtcacccattcccttatcattcctcaacctcaaaggccgcgctaatttcctccgaaaccgatcgcgcgcgcgtgttatctcgaaactcgatacgaaaccgataagcgtctcgtcgcgagattacgaggggcagcccacagcagagcagataacgctcagtctcacgaacaggcacatcataagagacgagagcaagggcctttacttcccgccaagaccgaaattctcccgctgggctggaacggaacttcattcccaaaaagctggatctctcagggatagctcccggtgggcctgccacctactatcaagcggtccagggacgacggagcggagatggcactactgctattcactgttggtcttgatagggaataccaaggtgttgattggaagcatgtatatagctcctagctggaatgcaatgctttcctcgactgcgatgttcgattcacctcgttttgagagccaaaagtcacgtcctagatctcgcaactcaaaggcaaagcgataacaaacatgaagaatctattctgcttgaggtcaccgccgatcaacccgttgaacggaaaggctcagaaactacccatcattaaccctttcgataggcacggccgagtattcttcttcgcttgggcatccttctgtgagttggacatcaatcaaccttgacaatgattgaatgctcacctcatccgcgaattccgactcgtcaggctgttcattttcggcatggtactccttttcacctctgtccaaatccatcaaagcagatctcaagatcaccaacgaacaatggctcaacagtaatatcatcgcgttggtagcgggaatggtcatgcgtgctatcgttggaccatgttgcgatcgtttcggtccgcggaaaactagtaggtcctgattcgaatcatattttccctctaggttcaacactgacctacgacgtgtcatagtgaccggagtgctcgtcgctgcggccatccccacggcattggccggaaccatccaaaactacgccggattgatgctcattcgattctttgtcgggatcgctggagcctccttcgtgcctacgttgaactggtgcaccatgttctatgacaagaacgttgtcggtactggtgagtccactgttcgggatgtttaggcgatcacacggtgtcctgaccctccggtcctgggccgcagccaacggatttgccggtggatggggtaacggaggtagtgctatcgccttctttatgatgcccgccgtgtacgacagtatccgcgggatgggccgaacttcgcacgtcgcatggcgggtatcctttgtcgtacctacgatcatgctgctcgcctgtgctgctggatcgtactttttgtgcgacgatacgcctaccggaaaatgggaggaccgattcaacgcgacctcgaccgtcgtcgagatgagttcgccttcaagtgtagaccgagtcgactcggaaccttcgaccgatgacaaggacgacaagcgctcgaaggaacccaccgtcatcatcgccgacacactcgatgatgatgaggcgcagaactcgagggaacccacactggtcatggaagtcccgcccaaacccagcttgaaggattccctcaaggctctttgctgcatacagaccctcatgctcgcggtcccttacgcctgctctttcggtggagaactcgccatggtatcgatcctgagttcctggtatcaacaaaagttccccggttggggacagaccaaagccggtcaagttgccgcggctttcggagcgttcaacgtcatctgtcgtccgctcggagggttcctctctgatcgtatctatggagccgtctctccccggtggggaaccaagtctaagcagttgtggtatggattcgtgagtgaaggcccttggcgtttccttctagtataccagcgctgagctacccttctcgacctcatagctcgttacggcgcagggtatcatgttgacctggatcggactcgtcaacccgaccaacccgatcgcgcttgtcggtgggatccaagccatggccatctttatggacgctgcgaacggcgctgcctattccttggttccccacgtcaaccctcagtacaacggtatcatgagcgggtaagtcgactgacaagaacctttcagccgtgtacgaatgctaatcctgaagatccgcttgtacagtgctgtcggctcgaccggaaactttggtggtgttatgttctccgtggcagtacgtttcacggacttcgacgtttgctctctgctgtcttcgtctctaacctgattttttcttctatagttccgtttcaccaattaccacaagggctgctggatcatcggtgtttgcagtatggcggtcggtatcttgatgactgccattccccctattcccaaatcgcaactcaaggccggcggatacatgagccgatagacacatagaagatttgtaaacggaaagtatcccaaatgctacacatgcatgcttgaacggattgtccatttcagtgtcggatcgacactgccgtctgtcgatatgccagatacttcggtaactaccagatgagagcgaaaggccaagtgtacttccgcataatgagaccttgcatgcgtatttggttgtccgcgcttcatcatcatcatcgaaaatgaaatcgatgtgatgaattcggttcttcaaacgacaacgcccgacttggctttgactcttgctcccttcttcttcttcctctctcacaacttgttcttcatcataccctcgaacaacgtggtcttgctctcgtcctgagttctatatgcggcaaaaaacgttaacgagcagacccaaggaaagaaggcgatgacggcgactcacccaggtgttcccttgacagctcgctcgacgtactaaaggaaaccatcaccatcagcttgtagacggaacctcatcaatccgcatgtttataaactcacgatctcggccttgggcttgacttgagacatgtcgtctagcgtaccggccttgaggaacaatctctcaggcattgagtcgggttgggagtaaataccagatccgcatttcctgcagaacatgcgcatgatgggcttgccagaatcggcaacgttgtcctcatagctctagtcaaagggaatgtcgatggtggtcagtttcatggccagacagacgaccagggatcgaccggttcttacagcgggttcacccttggtgatcttgagctgttcacgcttcagattcacgttgtaagaggccatggtcgagatcttctggcatgtctgcgtgttcgggtgtaagcaatacgaaaggaaggcgccgactagagacttggacctactcgacaatgacagatgaccccgtcgacgggaagggattcgattccatcgaccgagtaggtgatgtcaccacacaggcaggatccagtcagactgttgggaggcatgttgggtggatctttgggcgggtttggcagtttctgggtatgtgggaccttctgagaacttgattggatggcttgcatgcatattgcacgttctcatatgcccatgcatgtatcgttgctcatcatttatataagcgtctgcttcaatcgccgtgtggggcctcctcgatttgacgccgcgatcgttgccgagccagccgaggagtgcggcaccatatgcataacaataatatatcgcacggacaatacgttccgtggtatgtccgttttatgtgtcttcttgttccaggccatgataatgctcacgagatatgagctatttgattcgacatgcacgacatgagtctatgcgaagctggatcgagcggctaaatagagtaccggatcgaagataaaacatgcaacacgcacgcttttcccatgtacaactcaagcggtcttgactattccgatcgattgtagattccctagctgaatcgtcggtcaggaattgccataccctactcggaggaagggccaactgatgcggctgtgtgctctgaccgtatgacaggccgtgatcaacgacgaggtggaccggaagagtggatttggatatgatttcgctctaggtgcgagtttgcttccgctcgatagccgagcttacactgtgcttgtccgccgcggtccagcttcggagaatcgggcaaggtgatcatgacctgcgactttgcttgggatactgtataagagatcaagagccggatcagagtcgatggaacttgaactcttcaacgcacctatagtgttatcttcatagccacccaagaagcccttacactacaagtccgtaagccataaggtcgccatgaaaatgtccggagcatcaaccattgccgccgtcggtctcttctcgtcgggtttggccgcaggttagtctgtcgtctggttcaatcgggtctcgtcttgcaagcactgacgagtgttctcttccaatccgaccaggtctgactgctgcttatcctttgatcatcaacaaagtctttcaagacccacatggtcaatcggtcgcgcagagactggtcatctggaacaagggctaccaggccggtatgacgtccatcccgttcaccgctttcggtgcggcagcgtgctacttgatcggggcctatcgctatcccctgatcggatcggtgaaacaggcgtcgatcatctccagcctgttgcatctggctatcataccattcaccgtgagtttcagcttcatttcgatgttcttccaagctgttcgcaagctgaagctatggcgccccgaccgcaaacgtctcgcagctcttgttcatcgggcccgtcaacagtatcctcatcggcatgcgtaagaaagccgaggttgggacctcgacatacacggaatcggacgtcgaacctctcttctcgagatgggtctttctgcacaactgtcggtgtgccttgacctgtgcggcgttcgctgtaggattagggaacgtcctgggtgcgttcgcctagagacccggaaggtagcttcgtacaacggcaagactggtgaggaagcagtcgcctggactgtcccgattatgtattgttttatcggtttcatatcagtatcttccgtacatgcgcctagagcggcctcaagtcttcgggatgagcctctttccaagctttgattccccccgtcaagacgtatgctttcgagctcgtaatcttgtcctggttcaatgcgtcttggtaccaccctgcacaacgcggtccccggccattagaagatgaacagtggaagatgacccgaggtatcctgcaccaataatgaagaacttgagtgaattggctgaagattctgagcacgacggcgtattccactgaccgagacagtatagcaatgagcgtgggcagcgtctggtggaacgtctgagcggggaggttgatggctcccggtatgatcatcttgccatcagcttcctgtccttgacgttcgaacgcatcagccatcgagccagtgttaatgcagggggctcgagtgactcacgtccatgtcagcccttcgaacgtccacaacgacatagtcgacgccggctcgtttgctcgggtcgtccatcgtcgacctgagctcggagaccgccagctgcaagggcacagcttgtggagcgggcaaattagcgtgccatggaattgtcgacgacataatctgcagggtctctgctaccttttcgcaaggtagactagagaggtcatggtgcacgtcacataatcgttgattacttgaacaagtcgagacctgcatctggatcgagattcttacttgaacggcattcggaggcaaaacagctcacggaagtattctaatcacgtaaagaagattccgttctctccaatcgcgccgagagacggaatcttccaacaagcgagagcacgttttagtctttgggatctggatatctcccggactttgaaagacctggacagctaaaaagtcgtccccgaccgatatctcgatcgatcttggcttggttgatctcgacattccgtccgctgatcataattaaatacattgaactcgtcgccccggaaaacctatcgcgtgcaaatcgactgttcgaccatataagctcgaggctggaccgggcatgatatcgtgattagaatcggacacaccgcaggcgatcaccacaataagaatcgagaaagtttacaacttgacaagaccatgtcgtgccgtcaacctctcgacctggacgtccacccgtcatatcccgagaaacgctcggccggaacctcgaccatgaccaaagaggaggaaaagtcgctagacatggagcaggtccctggaggcgaccaggtggacacgacaacgccccagaacgcttcgatgcccgtgcggccagagagtgagtcgctcgatcgaaatagcaagaggatatgggagatctgcagatattgactcgattcccttgttcatccttgccagccaaactcttgatgggactcggatggttggatcgttttctggccccgctcgttttactggccatgattctaggagtcatcatcggtgagtggtaccagccgaggtctaccagcttgccgtccaattgacgagtgctgtaacgttgtcaggtaaattcgccgacaacgtcgagagcgtgttgaccagtgcgacattagaaggcgtctccgtccgtgagtattccctttgactgctctgaccgatagaggctcatgaggatttgcgtctgccgtgctagccatcgttgtggggttgctcgtgatgatgtggcctatcctgaccaaaggtgagtcgcctggcgcctggacatttcatatggtatcgacccgctgacaaagtttacttggtcgtccgagcagtccaatatgaacgactaccggcattgttccgaacgattcatatttggaggcaggttgtcctctccctcattctgaactggatcatcggtccattcgtgagtcgctctccctcgcagcgggctaaaagcgccgaccgactcatcgacggcttgcgattctcaggtcatgctcgggatcgcttgggccacactgccagacctgcccacgtaccgtactggagtgatcatggtcggcctcgcccgatgtatcgccatggtcatgatctggaatcagctcgcacacggggacgtcgattattgcgccgtcctggtgatcatcaactcgttgcttcaaatcgtgctctactcgcccatgtcactcttgttcgtcaacgtcatctctggagaagagtcactcgaattggactactcgcacacggccattgcggtgtgcatctacttggggatcccactggcagcaggagtcgtcactaggttcctgggcatatggtcaatgggcaaggagaggttcgagaccaaatttctgccctatttcggccctctggctctgctcggtctcctctatacgtgagttggcgtctctgacctgcatttaagcgagacgagcggcgatgctgatcgagcttggaatcatccgtcccccaggatcatcctcattttcgctcaacaagctaaccggatcctcgataacatcggctcggtcttccgggtctttgttccgatgtgcctctactttatcatcatgtgggccggaaccttcttcctcgtctactacttgacgtcccggaaagaggggtcgaaaaagtatggctataagatggccgtcgtccaatcgtttacagcgggttcgaacaagtgagtcttaatcgccaagaaatgatcccaacacacatccgttacacaagactgacgaatagcctcactgcgcgccccgtagtttcgaactcgccattgcggtgtgtatcgccgtgtacgggatcgattctgaccaagcgctcgctgccacaatcggaccgctcgtggaggtgcctgtcctactcgcgctgagttacgtggcgctcatctttgagaaacgtctgaactggggcgaacggctggaaaaggatgacctgcaaggtctgagagaggcatgaaaatggagaagcattgcacgcgtttgtagtcatataagtacccaattgtagtccataatatcagccaaatatatcctctcagcattcgcaacagccgcactcttcgaaggtagcatggtatgttccactcgcaacaattaacagggataatcataagcaatcgttcatatctataacagtttctgagattgcgagcctgacattgagcttgttgctcggcccaacgcgtgagaaagctgacgctgagttaagcgcgtgcgctttttccatcgaaacactttaatcttgtcaggttgggaaaattccttgtcccacccacccacctcgcgcgcggcaacggacctacccccaccactctcggaccactgggaccacctagggtcaaacatatccagaagacatcaattcgatagactcgcaccactctgcctgctgcttctttccttcttcaccgtcggtcaccaccacaaaaacaaccgccaaccatgtccaagctctcagcttcaagcgtgcgaaccaccgtcaagaccctgcttatgcagtcttccctcgagggacaggctcagaagaacgacgatggtaccaccgtcggaaagaagaggaacttcgtcgagaccatcgagctccagatcggtttgaagaactacgacccccagagggacaagcgtttcgtgagtcggcggcagtcgtatctagaggcggcgaatggaatgtcgacgctgacggggtcgtacgatcgcttgtcgctctgtatagtcgggtaccatcaagctccccaacgtccccaggcctcgtatgtccgtctgcatcttggccgacgctgcccacgtcgaccaggccaagcagatcgagctcgagtacatgaccgttgaggacttgaagaagtgagtcgagtcgcgcgacctgatcgcctttttactttggccgaggcgctcatcgccttttctcccccgcttgccttcccgttcaggctcaacaagaacaagaagctcgtcaagaagctcgccaagaagtacgacgctttcttggcttccgaggctttgatcaagcagatccctcgtttgctcggacccggtctttccaagggtgagcctcaatcgtccctagtgcttgtacatcttgtcgatgctaatcgtcgaatgattgtctgtcctgtgcagctggaaagttccccacccccgtctcgcactctgacgacctcaccaagaagctcatcgagatcaggtccaccatcaagttccagttgaagaaggtcctttgtctcggatgtgccatcggtcacgtcgacatggacgaggaccaggttgtcgccaacaccatgttggccgtcaacttcttggtttccttgttgaagaaggcttggcaaaacgtcaagtctttgcacttgaagtccaccatgggcaagccccaccgaatctactagagcgatcgcgtagatgacgaggacgagtgcaaagaggatgactatcgacgcgcccgactaccattgacgatcacactatttcgatcgtgtccaacacctgacatctcgaaaggcttcgcacgcttatacccaagtaccggaaaagaaccgcgcgggagaagaaaggggtctacgtctttattggcgtattcgtcgtttttctctcgtatgcaccttttcactgtgctgaggggagctagggggacatgaatatgtagcgaatcgtttgtttctgtcgtgcatgtttatatgttcatcatttcttcatgatcgacacggttactgtggtgtgagagggacccagcccattcgggggctatcatcccttttgacggtcgacgccatttctcgcgtttgtctcatttgtcaacaaacagccgtagatgttcgatcaaacggttcacatgttcaaacccacaacctcgcatgtcttgcatcagtctgttcgccgtactgacctttttcctgatcgacgaaaccctttcgactatccgtatactgctgtgattcaacccgcgagatcccccttgatccgatacaggccttaaatcatcgccgagtaacatagacaccgagcatcacaacgacaacaaatcaacagccccgcctacttccaactctcatcaataccatgccgttctgtataccctcatcatcatcgaaatccacaagtccgtatgagccgaccaacaagaggaccacggagggcgggtatgcgaccggaaatgggatgatggccggatcagcgggtcggtcgaaaaagccggtgagtcgcatgcaagcatcgctcacaccaggccgtagcacgagagattgatcaggcgtataattcgtcgggtggattacaggtgaataggaagttggtcgtactcggggatggtgcttgtggcaaggtgagtcatgagagaggctccagctccggaacgctgttgcttgatggctgattcgtctcgttgcctgatgaaagacgtcgatgttgacggtgtttacgcaaggtttgtccgggatgggtcatctcgactgagagctacacggaagtgctattggttactcatcacagtctgaactacaggtcactttccgacagactatgaaccaacgggtgagtcaaggagggtttcttcgcccagtgccttggctgatcccgaatatctcgccgatcagtctttgaaaattatgtcgagacgatgacggtagatggacaggcagtcgaactcagtctttgggatacggcaggtcaggaagagtacgccgtctcagcctgatcatacaccgccgttgcccgactaggctgacatgcgaattcgcgatccctgtgatatcattcgtgtggaaacaggttcgacaggctacgatcactctcgtatgccgatacacacgtcatcatgatctgcttctcggtagagcgacccgaatctctagaaaacgtcgaggcgaaatggataggcgaagtggatcattattgtccagaagtgcggatcgtcctggtcggcaagtcgacgtggtatagagcacgccgacactgtctgcgagggctgacggttgcgactctctcgtttacccagctttgaaatgcgatttgagggaagacgaagtggccagccggagattgatggagaggggtcaacgtggggttctgacgtacaatgacgggttggaggtggccaaacggatacgagcaagccggtatctcggtaagcatcagatccctgcccctcgtgttctcatcccggctgttccttccgcacatcattcgctaacccgatcttggcgaatcatgacgtagagtgctcggccaaggaagatcgcgggatccagcaagcgatcctagagaccgcacgggtggcattgacgaagagcaaaccagcaccggtacggacggacgagccgatggggagtaaacgtacggaaaagagcaagaactgcgtgatcgcttgatctcctattcggaaccaccaggcgttgccccgcggcgagggtatcatagcgatagagtcatggatggacacggcgaagggcagagcactgtatcattccgggtcttatgggtagcgcgatccccagaacgaattgcttgttgcaacggatacggcatccatctccagtcgagccagagtagaaacgctatgacgaccaccagctcaccggaacgcatgcacgagcatgatgtcatatcatacgggcgcttcaaggctcgagattgaactctttctgatgtcttccctcggcctcattctgagtctctcgcccgccacaatttagtgcgagcatgatagcccggtctggccattgttgcctttggccgactgaagactcgcaccaaagggctggcgtccggcgatatgggatctacctctatgcgcacctccagctgaggtgtgctgtccgaagcggaacactgcggcctgctcgccaatgaatagcaaaagcccctgggcctgtgacgcttctaggagtgacgccggggcatccgtttttttgccttattattgactataggcatgtagggccctaaacaggaaacgagaatgggaaccgaacccccttttgccagtcttgaaaaccgacccataacccccaaaaaaacagaagcggtcgaaaaaaagcacaagcgaccgcttgtgtttcctgggaagcccgcttctcatctatctgagaccgaagcgaccgctccaagttcgagattttgaatcgaagcgaccgcttcagatcccggtaaccactacgctattccgtcgtggttattgctttctttttgttcctgaccatagtttgtgcttgatcttgcgcgtgaagacacgcgtaccatccctttgacaattgcggcgaaaccttcggaagtaaatgtgattgatgggttgtgatccgattcccgctgctggctgacagtcgatcaaccacgcgagacagggcagagactcgtggttgacctcgaacatggaccatatctcgtgcaactcggggaaatggagcaacgaccgattctccaaaacgttcttgttgtgcgagctactataccaccactctagacctatcaatcgagatcgcacaccctcacatcatcaggacaatcaaaacaagatccaaactagacaattgcacgagatgaccgactttcaacccatcttcaagatcaccccaggcgtccagtcttatgactggggcaagatcggctcgaccagcttggcggctcagttcggagaacgatgtatcgaggactttaccaccgacgatagcaagccttatgctgaggtccgtaactggttcgtcagatgttatctagtctctcctgacgagctgattctcctccttcattccctcgtgtagctctggatggggacccacgtcacgttgccttcgtaccagacctccacttcccgacccctctccgagatcctcgcctcgagcccggaaaagtacctgggcaaagccatcatcgaaaagtacccgaacgctgccgaaggacagttgcccttcctcttcaaggtgctcagtatcggcaaagctttgagcatccaggcgcatccggacaagaagctggcagagaggttgcatgcggaccgacccgaggtttacaagggtgagtccggcccgcgatcatcggcgcggatggtacagagtgacccactgactagtctttccatgcatgtgttcatactcagaccccaaccataaggtaagctcgagctcacttaaggaccctcttttgcgaaccactgtgctaacccctaaaattacccggggatacagcccgagatggccatcgccctcactcccttccgaggattctgcggtttcctccctcttcctcagatgctcctccttctctcgactgtccccgagatgcgcgctctgatcggggacgaacccctacgccaactcgccgctacgctcgacctcgctcttcccgcttcgagcaaggtggacgacgagctcttgcgtctggcggataagagcacgaacggcggcaaagtagaagagacgtcggacgagcagaaaaaggccctgagaggggtattcgaggtcttgatgaaagcttccgaggaacaggtcaaacggacccttcagagcctgttgaagaggtacaccgaagcggactcgtcctcgtcctgtgcgacgagggcggaagaatctttggtcggactggtgaaacagctcaacgagcaattcccggatgacgtaggcgtattgtgttgtttcatcctcaacgtcgtcgagctcgaggtcgggaagagcgtcttcctcaaggctgacgaacctcacgcgtacatcagtggaggtgagtgcggcagggtcctcggtcgggcggtttgatcgtacggggactaacaagcattgcgtgtttatcgatacagacatcatcgagtgcatggcgacttctggtgagttcagcaccgtcgagttggataccagctctacgtcccggctgaccaacccgatccttctcccttgatttccacgcagacaacgtcgtccgagccggtctgactcctaagctcagggatgtcgacactctcatctcgatgctcacctacgtctctgctcctgccgacgcccagctcttgacgacgacggatttcgcctccaagacccaactgtacgacccgcccatcgaggagttttccgtcctgaggaccgctttggacaaggccggggagaaggagacgcacaggcccgtcgagggtccgagcatcgtcatcgtcaccgaggggcaaggcaaggtcggggaagaaaaggcagagaggggacacgtgatctttatcgccgctggcgtcgaggtcgagttcgaggcgggtcaagccgggttcacattcttccgcgcgttcgtcgaggcgtgagtctcggttgcggttttttattagagggggtagggctcgtttgtattgtgggactgtaatcgattgggacgtggttcatagacatggtcgattctacatgcattgcgagcgatgtggaccggacagaggtagcgtctgcatcgactcgactcgacatggcatggcatggcatggctaagggtcccgtactgcgtatccattcagggcaataaacgagatcggcccgggtaacgtacgagtgattctgacctcaatcagcttcatctcgtcgaaacgagcgcatggccatcatcacattgcgctcttactttaaaggttggagtcaagaattggacaagctagtcgccgtagaggcccatcacaggagggatgcaacacgtcttgcacatcttccgaagtttgaacctgaccccagaccccagggctatagtctttcccacggtcttacgccttccaatctatacaacagcaatgtgacatacgacatgcgtccttgttcagtctcgaccggtctgctcgggaacagtgcagaccatacgtcgacaaactctcgaaccgattcgtatgggcgatttaggcgctgatccatccgacgcctgatgactccaagatcgtcctcgactggagacgatgactagccgttaggagtgaggatgacactacgtacactacactcggactgaatcgatcgttagtgagtggtggtggtagtagctagatttacatacggtgaaccgtgttttacgccttcaaagactagccggcgtcctcgtgagccctgcttgacggaagtaatttagcgtgcgagcgagcgggcagtgcaacgcaggtgcagtagcgcgcattcatggcagcagcagcaaaggcagggccatggctcagatctctctctctctctctctctctctctctctagctagcaagtgtgataacaatcaccacctcgtgagataaaagtgtatgcaactcacaaatcgactataaccacaccgacatcatactgtactctcacaggaccctagtacgaccttctctcatcgactagtacgacagactttgattgcgaaacccgtcgagcgaatcacgatccggcccgaacgcacaaaggaaacgataaaactagcacgaatactcgggcaaagaataaataaacacttgctcgctcacccgcgatcgaccggtccatttaaccgtcagcggatcagcctcgatcgcaacgacaaaggctcggaactccattgacagcacgtatacacggctagagatccacggcgtagtatagtatggattgagagcgacaacttcgagtccatcaagcgagaaaaggcttggcctcggcgaatctcggtcaggacgaggcggatcacagttcaggtctcagccgggatcgctacaaagccggaccccgtggctatcattgcgatcgagcatagactatcacccggacgaaagcagctcttgaaagggtacatcaagtggaatctctcaaagaccggctcggtcccatctctaaccatgtcgacctcgacccgaacacgactctccgtccttttcatcctgctgaccaccctcaccccggtcttctccatccggcacacacctgtctccctgccattcggacctctggccctcttggcgctccccgtcgcctatgcctacgtccccgccgtgcccgtgaccgatacgacggggttgaacttgacggacgactcgaggttgaatttgaagtggaacccggatgcggggagcggtggggtatacggggctagcgtgtaagcaggctcgtctggtggaagccatgcgatgcctgatccggccgtttgtttctggacatgatgcaacaggtcgtaccaattggaagcggatgaacccacacccggagcagacaaggtaaatcccgagcgggcaccatccgggttcctttcatcgtgcactatgcacagagaatgaccgggactgatatacgcccgtcttgttcagggggctctcgtacactttaccgaggaggaagcgggggataacaagacaaccctaaccccatggatcgccatgatcgaatgcaggaactggacgcacgcgagcgattattgggacatctttacgctcgcaagggatcggggcgcggtagctgcggtgagtcgggggtcgcaaactctcagcgttcatcgacgaggatgtagacttaccctcacttgtgggctggttcggttcgggttgggttggcacggaacagttgttgtacacgacggtggcgcagagttgcctgatcaaccagcagtacctggacgatttcgaaaagccattgaacgtgtttgcgacgaaatcgagggcttcggcgacgtgagtgtcttgatcccatctactaccgaccgcggcgccgaggttgctgatcgaaatcgtggctccggcggaacttttagtttgatcgaggcacagttcaatgcgactcaaccgcagttttggcactacaacgagagcttgttgaatcaatcgtgagtacattgtcgccttggctcgacccggatcaaaggttcaaatatgcgaccctttcttgcatctctacagatacgaagtcgtcaacgcctcgctagaggggaacacagtaccatccaagacttacctcatcgccacgctcgtcgcgagggattctcagggacaagcgacggcatatccgacgtcgacgtccagcccgacggctccggagagcggcacgccgaggaatcgctcggtaccgatgatcatcctgtactgcgctgcggggatcatcggcgtgctcctcttgtcggtcatcgtcaccggagtgagtcgtgcatagcgcggttgatctgatcgacagatccctcatgattgaccttgtacccatcgactcttctggtcaggcggtccgggcgttgagacatcccgagagatatggacctaatgccgacctaggtgaccgtcctccccctgcgagtacggcagccgggatcggtcaggccatcttggacacgtttcccgtcatcaagttcaatcgccctcgacgacggaacaatagggacaagactgcttacccttcgtacgaccacgaacgtggtgatcaagcgcaggatggggacggcgatggcgactatgccgaatcgtcatatgcgggttcgacgctacagcatttgaaacatcgggatccggaaagccctgggatggaggaagacggcaaggcgattgaaatgacggagaagaggagtagcaagcggggcacgagggagaacaattcgaggcccgtatcggacgccacgctcatcggatccgctggacatgcgaataccgagacgccacccaagtcgcctgtccgtaccggggtcatcgttgtcggtaataccaaggaccccgagatcgccgcggccgcaaaggcatttgcggaacagagacgttcctggatccagaatcatatgcaggataagcgtttcgccgcggcaaaggccgaggggactaacattgtgccctcggtgatcgctcctcgcactgctcctagccgcacaataacgcccaagaagaagcaagagtcgacggtctcgccggcggtcgtcgtcgaagagcaagaagaaggggacgacggcgaggaagaggaagtgtgtccgatctgtcttttagagttcgaggagggggacgaggtcagggtgttgccctgtcagctcgagcattctttccacaaggaatgcatcgatccttggtgagcgtttagtgagcagccttcgtgggtggaattagctgaacttctgtatcgctactcaggttacttgaagtctcgtcaagttgccccttgtgccgaaaaggttggtcctgcgttttcccactggtagagacgcagtcgagatcaaggctgacaatgcttctgatactcgtgcccttcagactttgctgcagcggccaaccagactggattggagacgaccacaacagcatcagcgacggcctccgcgtcgacacatcccaacgaggccgatatccgtccgagtcgattcggtcgttatctggcgtttgtgcgtcgggaacgacgtcggcacgacgaccaagacgaggaggacgtgcaaggagagagtgtacagagacgtcgatcacggcgtcggagagagcgatgggaacagtctggtcccgggccattttaggcggatcgctcaaccttgtgttttggtttgtgttagtggtacctagagttgcgtttgtagccttcttttgccttctgtctcgttgtttgatgccgactgtgcgggatactcttcccaacgatacgattagaatcctgtgttgctgctctgatcgcatagctgcctggatttcgggcattccggacgatgttcacggtcaggtccggtgcggaatcatctccgcgcgtgcaaagaccgtccactcgggcgcccggcctagagcaacaccgaagggtcggggttgcggtaacatatatactatatgcaagagggtaggtgtaatacagctcgagcatcagactcatgacatctctgaaccaccatcgcccggcatgattgagactatcgctaccgatccatcttttgccggctcattgtcgaaagactttacctatggattcgcaagcgcgagttatcagatagaggtaaggatgtccctccgagcccgcctcggttgcggataataacacactgatatcgcgcaatcacagggcggttaccaggatgatggcagaggtccttcaatctgggacgaacacctaaaaaatcaggacaatggaaacgaggccgtggattcgtaccaccttttccatgaagacatcaagctcctcaagctctacggagccaattcttaccgcttctccatctcgtggtctcgggtcaaaccccttggaggcaaggacgatcctgtcaatgagccaggcttggcatactacgatcaactcatcgatgccttgttggccgaagggatcactccctgggtcaccctttaccactgggatctgccgctcgagctcgagaagcgatacggagggtggcagacggataacaagcaggagatcatcgacgatttcgtctcttacgctggactgctctttgaacgatacggggatcgtgttcagaactggatcaccctgaacgaggtgcgttatatggatggaagcctttgggacagttggcaagaaaggccctgctaatgtgtcctcgtgggtgctgtctcagccgcacatctttactatgctctctagtttcggtttgaaacagccttggaatagagaaaccgatacttggaagtgagtcgacctcgatggcggcgcaggtgaagagtcgaacctgataatcatttcctcatcaggactggccaccaccagctactggctcacgcttacgctgtcgatctgtaccgaaccaagtatcaagcgacccaaaacggcaagatcgggatcaccttggtatggcatctcgtatcaggattactgcagaaaagacatctgatcgtcgtcgtctacctccccgccggccgtctcagaactgcgactggtgtgaacctatcgatgattctcccgaagctaaagactgtgcacagcgcatgctcgatgccgtactcggatgggtgagtgtatcacggaaaccacgccatcgactgcaaactgattggaactccttcaaatttatcagttcgctgatcctgtttgtgagttgggcggcgcttgccacaacacgtctcgtgggtcccgacggacacggaattgaattttgttttcatacagtctatggtcacctgaacaagacgctcaaggaagagctgggtgacgtcctacccgaatttacccaggaagagtggaaggtcgtcaaaggtagctcggatttgtgagtcgatacatagccagattccttgtcgtggaactgccattcacttgaaacattctgccgcacagccttggatggaaccactatgggacttcttgggcgacggggaaaaagttcccattcaaggatgccgacccaagacaattcatctttgggtgcgtcgaacggacttttgaaaaggacggcgagcagattggtatcaagggtcacaacggacatccttatatcggtcagttggcgagtaaccgataaagattactggattgatggctaatctcgttgtctggcggtggatcagttccctggggcttccgcaaattcatgaggtacctaaacgagcgctatgccaagccttgtggcatacctatcgtgatcaccgagaacggtttccccgtcgagaacgaaggcgatctttcctcactggatgacattatcaaggacacgaaccgacagatatacttcaactcgtatttgaaggaaatgatcgaagccatccgtgacgatggtgtgaacctgacgggttacttcgggtggtctttgctagagtgagtcctttttgggctaaaaattggaaacgccgacctcatgccttgacctattcactgcagcaacctcgagtggatctttgggtacaagccaaggttcggcgtgacgcatgtcgatcgggaaaacgggttcaagcgcaccccgaaagagtcggcgttcgttatcaagtccgtcatggagcatgctatcaagaagtaagccaggcgggtatgtgggttgtacggctcgaacgtcaagatagggaaaacatcattgtatatgatcatgttatgagtgcgagtgccctgtaggtggcgcattatggaagagtgcgagtgccctgtaggtggcgcattatggaagtcatgcctaagttacaaatgaacgtgggtcgtcaagacggaatagtacagagggatctcgcgatctgcgcgaactcaggatcctggtctccggcaatctagatgtggcctgtgatagtagtagtgtcgctccttcacgagctgaacctggcgatggtcccatcgatggcacctccgtggacctgctcgaagatggccctggcagtctcggtaccgttggtgcacccgatgacgtcccattcgatcttcgagtccttgcccttggcggtgacgctcaaaaagtcttgcacgcccgaaacgacggtgccgtaaatctcgtaggtgccggtcaaggcgaattgctggtagaagatgggcaggtaaggagtggatccagatgacgagccgacgttcaggttgagacgctcggtaagggtcaggccgagggtggagaaggtacgggtggagccaggcgcgttgaccttgccggtagtggactagatgataggaagcgagtgaaattaggactgatatgcgcagaggatcgcgaaaggcgatatactcacaagaagggtgaatccttgccattcgacatcggaaaagtcaccgatacgtccccagaccttgctagggctagtgttctacagtcacatgcaaatgggtaccaatgagctggaggacttggggaccgtgaacagatgcgaggctacttacgggtacgataccctcgttgtgagccttgaagatgacggatcccttggggcaaaccaaactggagacgacggacgagagcgaactcgagccggtccaggtgggggcagcagtggtgaagctgaccaagctggcagcagcggcaaagacgagagatttgatggcgaccattttgggaagggagttgttgagaatgtgtggagagagtgtggagaggttggtcgtagagttcgggggtagacttattaaaggagaagaaagacggttgtgtgagcaatggagaacagacagtgcttgctgagtgctgcattagctggacccgtctccatagccaatccttatatattcattaggcagtcctcagttcgatgaaaagacccgggccacctcggatcgcgacgacaatggatcgccggtgatcaatccaatcactcattaaagggcaaagatgaagatcagagacaagcgagcgccctggatccggcacaatcccccgcgtcactttcgggtgacgtgcgagacatttccctgatccgctatgccggcataatgtcacggcgtcacgaggaggaggagctggtgacgcgggaatcaccgtgcttgacgcgctctacaaggccgggcgaacagaatagcacgcaagcgggagcgggtcagcgggatcagcgaataattattccgctcgatgctgagggtgctgtgcggttccaccgatcgcggtacctttcatctcccgcgcgaacgaacaaggcggatgcgggggacaacgcagggagagacgaaacagtctcatcccgcgatccgtcctcgggcctcgcaacgcacaccggccagggaatgcacatcatctcgatcagacatctcggcatccgccgaacggctgccggttaatagactcgacaataggggtcccgaaaatcgtcctttgcgtatcacccagattcagttgtggcactatgccaaagctaatgcctaatgatctcggtttgccaatctcgcgataagccccgaaaattgcgaatgggtcgcttgggaaagccatcggcgtctcgttacagtattcgtcatgacaaaatctattcctctcccctgtacccgcatgttcaccgccggacttcaagattccgagcgtcctccatcaaccggctcatgcgttgccattcctaaccgttccccagagatgaaacaccacgtcgcccgcatcagtcttcgttgacggcgtctcgcgaacagatctgactgaccatcttgatatagcccttcctctcgaaatactccaatacctcgtccccgtcccgaatcttctcagccgtgaacccggcgacagggacgaattttctcacctccttgacctcttcgtcactatcgagctcttgctcgtcgtcgtgctcggcgttggtatgtctcaggagtgtgcggtaaggaagtcggtatgcaaagtacagttcatgttctgttcataccgaagaggaacgggaggacggatcagtcgtgagaggtttcacaccggctcggtgcaaactggcggcttaccccaatgtgtgaactcgtggaagacgcgagctcgttcttggcaatacttgcctagcttgaaaggtccctttgacggaggtaccgcttcttcttcttcttgcccgccaatggtactatcgtcgtcttctccgtcggtttcgatatcctgcggcccatgtcccagcatttcttgtcagtctcctcgccatggccggatgagacgacactccactcacctcgaacgtttcgggatcgtacggacttccctctaaccttccctcatacttgctcatccttcccgacaagtgacacgcatcacatcccattaaagcctcgtccagggtcccaatgatcaactcggggtagacttccagactctccttgaaggctgctttccatacgctcgaagtgatcaacgaatctttcatcccctggaaacgacgacgaaaggcttcaagggcagtcttgaagtagctcgtgtccgcttctcgcgcaaactcgggtccagcgactacgagatggataaagtactgggagatgaccttgaaatggtgttccagatcttggtgacttgacatgcgaaattgagctgcaacgtccaagccacggattagtaccgacgcttgatgaacagctagcgtaactggtatgacacacgtaccaggtagaagcctgtcatcatacgcctcatccatttcggaatcgtcatcaatgaaatcctcctcctcgtccacgtcgattaccttgacggtgttgccttcaccatcggaaccatcgatgacgatctgtccggcatctccgtattcgtcaacggactggtctgattgttcctcgtcaccttccgactcctcggtagtcgattcgtcgcggtatggctgaccggtacgtttggcttgttgcttccctgtaaatggtgttgatcagactcagaagtcgcccattaaggtgtatcgcaacatcatacgcgagtcgctattcatacgtacgcttcaatcgagcaagattacgctcaaaggccgatttttttgtcctatccctcatcctgctcttcaggaccactgcagagaacggctcgaaagtcgtcagccttttcggtcgagttggatagggtagacatcatcaatttaccaggcttatccagagcgatttcttcgagcaattccttgggatcgatatcctcttcaatctcgtcaggatcctgtgtgcgccctttctttcgctttcctgctctagacttcgtgatgatatcgccaggtttgccaccgtcatccgaatctactggaggtgtgctactccaacctctcctaacagagtcgggttccgcttcaggttccgcttcagattcgctcgaaaagattttcaacgtcgtctgcggtcttgcggccgcttggcggaccttgccctcctcgattggagcgttccgctgtcctgtcccccgagttcgacggccatatttgtttacgctcgactcgccaggcttacggctcattgactgagacgggctgagcgaggtctcggcttcaaacaccgcgtcgtcgagattttcggtaatcctccccttgcctttactagcactacctttgcctgtcagaagatctattggatcatcagattcgtagtagtcgacctgcttcgtcttttttcgggttcgtaggggttccccagagtctaagggcgaaggaggcgtgaccggcccatcgctcctcgtctttcgcttgctggctgagcgtgtggacggtcctggttcacctcgacctgacgcgaggagctcatcatcaccttcgtcctcgtcctccaggacacgtcgacgacgtttgcgtgaagattgtgggtctcgccgaggcctgtcctgggtcggcgttcggagaggatcgtcttgatcctgagagctgacctgggcagaacttccggagaggacgataccggatctctgacgacgagtcctaagcctgggagatgcagtcgatttgggcggagaagcagaggaggaggacgattcgtggatgacgatggcatcgattgcttctctcgcttgactgctgctcttgagcggaatatcgaccgagtctttgcgttttcgtggtccggaaggcccatcgtctgtcgagctatcctcatcatcgtagccagataaaaccttcttcttcgttatctgcttcttatcgatctgcttcgccgaaggttgactgcgggctcctctcccaaacctgggctctgcgggttcctccgtgtcaagccgtgtcttgcggtgatctaaccgaaagcgatctagtctaccctcatcctcagagtcaacctcatctccagcctcttctccctctaccagatgagattgtgttggcactcgaaccgctgtaaagcttatgggagcttctctgtgagtctgcgtcgaggtcgaacctctcggcgcctgagatcccacatagtcgagaatactagtctgctgcgtgcgtcgggttcgcatgatggagacgaattctatgagcccgagatcgtcatccggaaggtctttactcggtgatgatgttgagaatagaagaagaaagtcgacaagcttgacgatcgatctatcgaagtgatcgcgctgaaacaggtgattgcatgttgactaatcgatctacctcaggtagagcccgtggcttgcctacctgaatgtttaaaacggctttcgacttgaggtacagcgacacgataaatggcagaacagtggaagcctcgacacaagctcaaagaactaggcccttgaggtttcgagagtcataatatcgtttcgacgaggtgatgcacttgaattgtagagtagtagaattgatgggtgatccaagccggatcagaccgagtgagcgcggattttccgattcaccgaacgcgaattcgacctagaactggacagacagactacaactacaactcactttgggactaccgaccaccgactcctgttcgtctcgtatccggtgtagtatagtcagtcccgttgacaaattgactctcggctcctcttttcctttttcttagagagccctgtgacgacaaagcgaacgcatcaccgacgaccaattcaacagcgactcggcgtcaaagatgcctcccaaacgaggacaagctgcctcagcagcgttgaacgctgtcaacttgcaagaaggcgccgacgaggaacctttgcaagccgtcatcctggctgattcgtttaacaagaggttccaagtcctctgcgtggaccgacctcggtgcttgctacctctcctcggagtcccattgctggcgtggacgctggaaagtttgagcctgagcaacgtcaaggatgtcatcgtcttctgcggtgtacatgccgaagacatcaaagaatgggtgacgtgagtctcctacatgcacgaaatacggtatatctctttggtgtacatgctgatcattcgttttggcaaacgacgtctcaatctcgcacagcacgtcgtcatattcgaaaacgctcaacattcaatgtatctcgtccacctcggctcaatcgattggagatgctctccgtcaactagacggcatgcaaattctcaacccaaagatgcctttcctcttgctccactcgcccgtcgtttcaaacgtcgatctgagcaggctcgtgcgggaccacaaaaagttgagggaggaagacaagaatgtcatcatgaccgtcggtgttggcgttggaggcaggtaagcataaacgatctctcgacttgaaggagaccttcgacatctgacgattcacgctcatctcggtctcatctctgcttagacgacatcctgagtcgcctttgttcctcgtcgacccgaataagaaccacctgctgcactactctcagaaccctcttatgcccccccgatcccggttccacatcccctcttccctcatattggacaacccggcatctacctcactcaccctccaggtctggtcaggaccctcaagcaagacgccttcctctgcggggtatcgagatcttggggtagatgtttgcgaggccgacgttcctgccctgtttacggagaactttgactggaacgacttgcgaagacatttggtcgtcggagtattgggttcagagctcctaggcaaaaaaatcgggatcaagacggtcggcaccttgcaggactcggagagacccgagacggccgaacaaatcaagcaaagcggagtcagtcgaggaatgggcaagggcaagtacatcgatcgagtcagggatacgaggaccttcggggatatctcgtgagccccatatgtaggtattgtttatttacacggtactcactttcgctgtcatcggcatagtcgtgatgtgctgcgacgttgggcattcccgcttgttcccgattccaggattctcgggcaggacgattacgagctgagacgaggaaccgtctacgttgcccgtgagggtgtcagactggcaaggtgagattgcgagcaggagcaaaaccagaaaacaaagacaatctataacggcggtcttcgatcttgccttgttagaacgacccagattatcggtccagctctcgtcggtccgaatacccacttgtcctccaataccattttcaggacatcgacgataggtcgcgaatcccatatcggatctcgcacaaccatttcggattcttatctcttcgataatgtctcggtcggccgagactgtactcttcgaggttgcatcgtagctcaaaacgtcgagatcggggataacgtgattatcgggaacggagcactcatcggagctggcgtcaagctcggcagtggggaagtcatcccagaatttgctagggtcgctgtgacagcattcggagcaagcgatgatgacgacgaggatgacggttattccgctggtgaggcagtcggttcgttttgcgagcgatgaacgtgcgggctaacattcacccatcctcttatgttcaatcagatgtgccagcatcgcaacgcctcgacaggcctggtagtgaaggctacatctggccggctgaagaggacgaacaccagagcgacgacgaggacgatttcgaggacccttacgagcatcctgagaacaagcggttgttgcagcttggtgggtctgcttgcctccttaaccaaatcaggctatcactgatctgtccttcttgcatgcaggacaatcgctctcgcgtgttatcagtgtaggctctacggcgtcaacattggagcacgcttcctccgcaggatcaccagtctcgatggcttcctccatgggtggtcaatccattccctcaatgtcgctcaacccgacggcatccggtgacttccatgtagaagtccgattatccttggaacgagctgtggatgaaggccacaaagctcaagatgccctgctggagctcactactctgatgctctcatcgaatgttagcgttagcggtcctgggggaggcaaagaggaggtcatcagcttcctcatggagctcgtcgatgtcgacaacggtgccaaggcggccaaagaatcgaccgtgacagtctgggaacgttggggtcctctcgtgcaaggtatcggtatcaagccggtggatactttactcgaagttcaggcaagtcacaaggtcttttagcgggttaaattctcatcgttattgacatttgagtatcctgccctatagcacttctgcaccgagcacccggaacaagcacagttcttcccgatctatctcaacgcactttacgatgcggatatcgtggattacgaagatgtcgtatcttggtacaagtccgaagagtctcgaggcaagggtaagactgaggcctccgaagatgaacaagaagcttggagaaagctttggaccagcgggggtcgtttcgtcaaggcgttggccgaagcccaggagagcgatgatgatgatgacgaagaggaagacgaggatagcgactaaggttcaccatcaaagcggcgaaagggtttgacaacgggctcgattagagctcttgtacggtgatctacatattcgatcctcttgtcgccgatggatggcatcagatgccggattcgtatacgcaaccgtgcctgcgtttatgttccggcaagtttccctcttggagatatagtcccgcgcggacacgcctggcggttttggcccacatttccgcgaatgtgcagcggtcgttctttgacgtatatcatgatgatacctttgcctcaccgcctcgcttcctccacaatttccgttcgctcttctctttcaaatcgggctttagatctttggcgctctttcgcggttctacgtatttgtcctagcaagcaacatttgtcagatgccgatccggacagtttcggcgctgcgagtcgtcccaccttgtacacccacgaaagaccgataggggaaagcccgccatctatcgctgcgcgataccaatatgcggcttcccacctgagcgatacctgatggtcagcttagcacccggtcaggctctttctgcaccaactcacatgtccttcttcagcccgtatttgccttggctgagaagattagccaggtctgtataggttgtttgcgggacatggttgtcagttgtcgggcttcaaggccgaaaagtaagctatacgattgactgacgttcttggttatcccggtctccttgctctgcacccaagcggtaatacattgcggccataacatgattgggttgattacgcttaccgcctggaacgccccaagcatgctcgaagcagttgccaacctcgtagatagccataacgacttctgcctacagttcgagcgtattatgagaacagtcagaaaggtgccgaccacgtccattccactcacgctcaatttggtttgtgaacccatgggcatcaagctttgtcttcgatcaatctctgagacatcggtcgatggtttctgcatcaccgtcgcacaccccatctctaaccacccaaaggcctgcttttcgtcccgttgcacaccccatccgtgtcgtagcgctaggccgtagaaaacgcaaccagctgcagagccgccttctgcagctttgcggaaataatgggccgactctgatagctcttcgtcgccttggctctgctcgtgtttatcgatgcccatctgaaggtagtcctctgcggatggatgagcagaggatgtggcaggcccggagccctctcgagatggatcgagatgttccgagagcggaggcacatatccagagtgtttcggcagggtctcaaatttgacggccctgtcattccgaccttgatttgcttctctgccctcagctcggtaccgcgtgcgctcttcttccggttctggcatctcctgtattgggggcggcggtgccggtcgactgtgtacaattcttccagcaaagacctctcctgccatactcctctgatccgggtccagcccgctcatcgtgccctctgcgcctggttcaacgatcgtcgcgccttgtatgatttttggatatgaaatgggtatcgtagtggaaggtcctatcgctgccacctgaagcgcttccaggacaccctgccgcagtgcagcatcgtcggaacgactgggatctccacttgggtccttgctctcacgacgggacctgccgtggtacgattcctcttcaggccaatcgccatacgagttgagcgtatcggcaacgctgacccgtgattcaccctgatagatcgagtcattgtcctgaaaggcatcaaatcggaaggacggttgcctaggaggcggtcgtgaggctctcgagacaggcatcgtaaactggatggtcggtgtcaaggattggcgcattttagctcaagatagctcgactagtcaggacatacgtaacgctaccgtaaacgcacgctatggtccgaatgtccgagtggggccgaacagctatgcgagccattgaacgtatcaagcggagctgatgaggcgtcacctgctcgtccttggttattgtcgtgatcgacccgttgtatgattgtgccagcagcaggaagcctgcgggggtccaggttgccgtggatattgagatggttctgaggaatcctttccaccttgaatgactgcagcggtattgaaagtcagccactgatcaggctccagtaaagttgaccaccggtattacctgagcttgactggacaattccgaagaagatgccggattctcctggacgaaatcctgctcatcggcaggaatcgcctttcctttgccatgcttacgaatcttgaaaggttttttgagaaagcccatgattggaggccgatgtcaagtgtagcttccggaataaggcctcttgattggagatcgcaagaggaagcgagagtgagtcgcgatcgagtgtcgcgaaatcttatgtccggctcaagaatgtcgtcagaggtatggctgtagtttattatggtggtcgtgtgtcgcttcttgtcattggtaatcatctagatgtggccactgcgtcatgattgagttgcgaggtgctaacgggcaagagatcgatgtgtccgcagggaagatgcagaaagatgcagtttaggtctaagaccgagcgaccacctcggcgtacgcggcacagccgaagcaacaaggtccctccgccttcagggttcaacgatcaacctcatatctcccacagaccaaaagacacatttcgaaccgttgtacaggatgtgagaacagatgagtttgagagcttgatgttctgccttttgggcaagtcacgggtatgtttgtctctttcgcttctgataagatacaacacgtagcagccacgattcaaggagcccctttgattcggatctagccgcaagttcctcgacatccatcaacagctgtggtcgtgggcgtggacgtggacgctcgattagaaccttttcagatcctctggttgacacaaagatcactcactaccgccaccgccggccaggcctcccatcgtaccgatcccgccgagtcgtcgtcccgtgccgttaccctgaccgcccggaccccttgcgttcgagccagagttgaaccccccacctccgccaccgagtcgagcgccccctccgcttccgccgccaacacggttacctcccatcccaaaagtcggccaggaagatgccggagtgtcggatggaggtctcgtccaggaagacgggtccaggatgggctgcgaatatcgacgccacatcagcaactcgtcgcgaggtcgcgcatgagagccggctaactcaccgatagtaaagtctctacgaaagcccatccgagcacacggatgtcctgaattccattaccgattctcgtcacgatgctaggggattgacgttggaccgggatgcgtccagctgatgaatcgggcttagtcgtggcctctttgggctgagaatccgtcggggacatttcgaaagcgctcgattcgtcgagatgttgagactaatgtagtctgtttcgcgaacttgatttctagttgatcaagggtagacgagcgtttccgctgtggacagttgcgaagagttgtcaggatgcccagtagcacatgttacatgacgatgcatgttcagagttatggacgataggtcacgagaggatccaggtaagtgattgctcaatttgattccggatacttccggatccaggtcgttcccggtatccataaaatatgatgcagacacatttcggcaaacgacagcaatttaacatcccagcccggcaggaacttcttatttttgaacgtaaaggatcagcagtttctcatagcttcggaaatcgcgagtgtacaaggccggccctatacattgttgctacagtactggcgtcaatgaacaggcaacgaccctttctgaaagcgacgaagggttggggtgacgggacagtagaaagctgtgcatgcagcagttctgtcgatacgatcatttcaaggcgaaggcaattcacatacaaaagctgggtcgataggcacacacgagatgatcatctcaatgaatctaccgcacgcagaccttgctagcagactgtgttttcccctgatacggtcaccatatgaggtctgacaatgctaagaaattgttgcagcattgcaaaccgggtccggtacagatcatgatcctttcccagagctatacgatgccgataccgaataagctcttggtctactgtaacacctcacatagcgcacaaaatggggcaataagagtacaagggaacggcctcatcggatcccgcaaggcgagtaggtgccacaccgttgatgttagacgtcaaccgatcgctagcgatggccggccatgaattccgttctggcaaatcaaggaagtggtcaagcaagaaatgaatcgaaacactggaagcggggtcccgggtgaccgtggacggagcagctatgagttcgaccccttcccgtaggctcggagacaaggcagaggtaagaacccctgcgaagtggcgcgacagattcacacttatgctcttccaatacgacaggtacaattcccatctatcggcgtggtcctcgacaagatggggcgccacagcgtttttccaccctgatgcacgaatgctcagttccaggactggccaagggacgtgtctgggaagctgttcctctggaagcctgaaaatcccaaaccgcatcacttctccgcttcagtcgacccggcttcctcccccaggtccgtccccgccccggaccctacctgttcggaagcgtcatagccatcgatcgcgctcaagatgcacatatgagcgaggacctgagaggtctgtattgattgtgacgcctttgtatgacggaaatatgaggaatcccgcaaccatgggttgatttagtttgcagtacttgcgaaagtacatctggtgcttgaggccaacggattcgcggagcagcgagcaaatgcagggccagaaagcttcgtctggtggagtagcaagtacggcggtctctttggatacatttctaagccccagcgtccacatcgttctttcaagatcggcaagagaatagagcccgactgtctgtctagatgcgcaatgcaactcgaaacgcccgtgcgcctcagacctgcttcttagcgctatgatttgcttccgagatatctcgttaaggtcggtcaacggaagcatttcggccagttcttcggatcagctttcgtcatccgatcgagcattcacccaagtatacatggtcaatcgttacccaatcgttgacagacccgaattcatctatcttgaccggataaaaggtggatttggtctcctctcgaaggcacgatccaacgctcccgggatatgcttgctggccttttagtgctactgctcacggccgtgatacctgcgttatgcgtcggttcgcttcttctcctggcatggaagaacccgcaagctatcttcgctcctgcgcggaggaagaccagcgccattctggtcctaggagatgtggggagaagtccaaggatgatgtatcacactgaaagtcttgccaagctgggatgggagacgagcttgatcgggtatcgaggtgcgtcatgactgcaacgtgacccgctcaatcaggacgagctgctgacggggctcgtattgaaaggctcgacgccgctagcgtcgctcatggctctaccccatgtccatttatcctatcttcctgatcctccttttgtcgttcgcaagctgccctttgtgctcggtgcaccaatcaaaatcatatggcaaagcatcagcgtgctcgtcctcttgttgagggtcaaggcggaggtgatacttgttcaggtaagccctcggcaatgtgagagtccttggtcaagtctgcacctcttgatcaacctggatctatcttcatagaaccctccttcaatacccacccttttgctagcgcagattgcggcccgtctgcgcggttctcgtctcattatcgactggcacaatactggtcacagcattcttgcgctgaagctaggtgcttcgagcccgatagtggcaatagctatgtggttagtcctcacctactatttcgattgcgcgacaccggtgaactgactctttgccctcggatcgttttcaggtttgagcgaaccttcggcaaggtagcctacgcccacctattcgtgacagaagcaatgaaacatcatctctcagaagaatggcagcttgagtacgtctcggtttcagccaacagtaccatcgatgccgatttgatgacttcgcttcttcagggggaaaaagatcgtcttgcacgatcggccaccggccaacttcaggaggtgtggagcgatgactgcgcacgaggtgagcacttttgggcggactctcagttgaaaggtagtaacgtaaacatgcaatacgaatcaatccttcaagctctttggccgcctcattccgaacctcgacccaccgtttccccgatcgttcctcccgaagactgggctcagcacccgcacccaaatctttactgagatgtctaaagcatctcaagagactgtagagcatattgcaggacgccctgcgctggtcgtttcgtccacaagctggacaccagacgaggatttcaccgtcttgctagacggactctcgctttacgaaaaccaagcgcagaggaccgattctgatttacccaagctggtcgtcctaatctctggcagaggaccgcttttgtctacattcaaaaagctctatgcagaacggtcggaaagggaggcctggacccaggttgtcgtccgcacggtctggctagagatcgaggattaccctcgatttctgggttgcgctgatcttgggatcagtctgcatcagagcagtagcgggctggatctacctatgaaggtggtggacatgtttgggtgcggcgtgccagtccttgctcgcggcttccgctggtaagcagtcatgaggtctcacacgccgcgtatcgcactgacaacatcggctgcggatcaagtgttggcgagctggtgaagcaaggacagaatgggatgatctttgacaccgctcaagatctggcaaaccaattgcaggtgaatcatgcatgcgcataggcaggtcttcgcctttctgccagaaactaaccaccattccggatacagtccgtattaagcggctttccttctgcaaaggaactagacagcttgcgcgccttctttccagaagatcatacgccagacctgccgggtgcgcacaactcgaaaagtcacagcactcaggagtcggcggaccggccatcgacggcggagtggtccacatgggatgaagaatgggcgcggactgtcgcaccaatcatcaatcaaaagtcacgctgagatactggtgctattataacaaggtctcaaacaaattcttccccagaaagagctatatctgcttgagctcgtctgtttgaataaaaggcgaatagaaggcagtaaatgtcagggtcagtgtgaacaactcgagccggcttgttgggctggctgacctatacgccgcccgcactcctttggcgtgactttgccatctgggaacctgtcgcttgttgggatttcgcccctgcaaattcgtccattagagatcgatgtatcagggttgttcatgagcaacactcacactcaagtgcatttggtcgatttctgtgctcatcgagcggataaagtgttcagtgacctataacatagcatcgcttccagacctgacctaccatcatcatcgcccagtcgagccaaggagtcgaagcgacaccagccgaagcttttggccccgtcatagaagcggatcaaccacatcggctgcccgtcatcttgagggcgagtcgcccaaacagcctctggtatccggtaatattcaccaagtacatcgaacactgctcctgggaagaaaggataattgccagctgagaagaaagggacgatctcggttagtctagggtttgactgaagctgtgagacaggcctcacttttggcccacactatcataacacgtggcgtaagtggagtgttcagcttattgatggtcggacatctcgaacttcacgcaccgagctctccaaccggataaggatcttgccaacctttcatcgcttgtcccgcgttgttggacccgtggaaggcatgtatccgttcttgtacctgaggttcttcaaggtcctggtctccgagtgcccagcgctcgtcgatgtcaagtggagcaggaccggtcacgtgctcagatagatttgacgctggggaaatcttcgttggtgcctcggtgatattgcctttgctgggattacgactgcgagttgagggcgccctgagctttgtttgttcctctagcgcgaacatcggctcttccagcgtctttaaagaagcacgcgcagtagcttgactggaagaattggatagacgtcgtttcttggttgcacgtcgtgaaggtcgctcagaaacagcttcatcgtgactgtccgccgccgctaagcctgttttagctgcagcccgtcgagacgctctgtgcatgctcccatttgaaggttgcaacggtcccggctctgccacggcaggcaatgcaggtggcggtgagcttatagaactcaagggactctcgatcccggctagatctgagagaggcgatgaccgggacggtgagatactgcggtcgttctttacttccgtcattgacttttgaaccggtcgtttgccggaacgacgtgagctactactcgaggatcgaccagcatgcaagatggtcaaagattcttccggtgcatctgagatatcactgctgctcgctgtgagcggagatgcttgggttcgtttcatggatggcttcgacgcttctgctcgagggcgcaattgcataagcggtaacatcatggcagaaaccggtcgactcacgttgcctgggtttacttggtcctgcgactggcgggggtggaagagccgtgcgaccgcgcctcttgctgccttcgggcagcacatatccaacattgaaccttgagaaagtctccttgaggtccacctcgtcaacgaccaggctcatctgcttctctttcgcccgcctctcttgatccgtcatgggcgagtacaccatcttgcccaacacgccggtctctggtcttcgcagtggtatgacgatcaaggaatcgtcggcagactcagaagccaaaccggtggtctcgcgagactgaatcgcgctttcgctcggggtaggttgagcagctggacgctttggtttcgatttcggcaggatagtcctaagctctttggggagcatttcttggtcgattggagtctcgatcgccgatggaccggctgaacgggtcgtccgtgccgatgcagtgacacgcagtggatcttttttggctcctggctctctcttctgtggtggcggacgaggtattcttatcttgggcaagggcgatggtgggggcggggggaacagttcgtatgcgaatagctgtgccagccgatctcgttcgtttccagggtcacgatcgagcaacggctgcaagcactggttgctaggttctaacgaaatcgatgcgtcttgctgttcgttgtgctggaggagcaagtcgtgtgagagttgcactgccaggtccgaaaaaacggtgacagccgccttctttatcttgttagcaagtttgtggaagaggtgatcgctcggattgtagagcatcgcgttgtcgagcacgaggtagacatctcgctgtagtcatgccgatatttagttctgtattgcagctcgcaggaaggcactaaacgaacctggaagtcggcgagatcgttatacgcatgggtctccaaacgttcgtctatttcatcccagctcatgggatgtttgacgatatcgagatagtctggtacgtctttgactgagaccgggtgcgcgaaatactgttgacgatccagactgacatgcgtgcgggtatatgagcgatttatacctaaagcagccggctgatgatgacccacctgctgatcttttcgaaggccaaacgaagcttgctgtcgtagggaaatagtacttcgtcgatgaattcttgaagggcttgagcctggagaagtttttgctcctcccgctcgaggctcaatttaaccagcctacgaactgcctccaaatcgttccggacggtgatgatatactgcgaccggaatactcaggcgtcatgaaagacaagaggtccacgacagggctcacctgcagcttcttgattttttcggcgtccgtttgctctcgagaagcactcgatgctgtccagggctaacatgtattcgtcagactctttgtagcttttccttccggaagtcaagaggacatacctctaaatacagtctcttcagtaagggcgctccccgccgtgcttctcgcttgagactccaatatcggcagatcttttcgatgcattctttcatcttcttcaatcgcgccttttgcacatacgtgaagatgctatccacgatcagggcaggcacgagtggaggcccttgcgtatacttcttggcatgcgcacgagccgtcttgactagttccggaacgttcgcagtggtagaagcctcgagaatatgactaggattgccgagggaaccgttgtgaccatttggacctccgccagacattttctccgtctcggcttgttccgctcgagcagcttgtacgatctccatttgttcggcctggccagaggggacacaatactactattagttcatgatttcggacgcagagaagtggcactgacgggcatatgtcgatcacagtaggctcgtaggatcccgtcttgcagaagagctttcatgctacccagattacctcgcgctcgtgcgcaagtaacgtgaaaggcagtaaaacagttcttgttgtcgcactgtatgcaagctccccctttaacccgacagatgctacatgtctgtacgtcatcgaactttcttagccgatccctcccattccaagtgaagtatcttgcttacgagtttccaacggcttttgggaatcgtttctgctccttcgataggttccatatatacgggattgctgacagagacttcgggaatccatatggcacacaaaaggtgtgcccattttccgttggtggtttgcttgaatgctcctgcttctgcgggacagaagatgcaatcctgtgacagggggggagcggtattgagccgaccatgagagaggtttggtcggggcgagccctgactgtgcactcacgacagggttctccggctcgaccgtacactttcggcacaaccattgaccttctgggatgtatggcactccgtaacaatctagcagtacatatctgtggtcagctggacctcatacaggcagaaagcggcatgcgacgctcaccctgatgtacagccaggttgcagccatcacagaagactatagcgttcgagttttccccttctccgtcatcgcatatggagcacttggaatcctcgataggcagagctgcgggagctgggattctcttgacctgtacataaggtcatctcatcagtcgtgtgcacagcccgagcctttcatccgctattttacgtaccaggtcgaaccattccttctctagcttgtccataatcacttcaaacagctcgtaagataggcggtccaactgctgcctctgccgctccgcgttgacgaggtcgacccattcgcggtctgcaatcgacaagcaattcaaaactgagctagatacgagatctgatgcaagactgacttgcttaccttgttcgtccatgtcgtattccacttgattcgccaagtcggtctcgatgggctctacatcatcgaataagcgattgttagcagattcgctcgatagagatgcgccgaggacgacctatgactcgccaatgtatcgcatgtaatgcttcggccgagtccatggtttcctatccctgggattgtacccgaatccttcaagctgtgcacggttcaggttggcttgcttcttgtaacgccggtcccattcagcatcatcctcgtagggtacgatccggaaggagacctggggcacatcgacgactttagcacccatctcgatgatcgattgccgtggtcgttgagtgtctccacagctcagcccagtcagagactatctcgtcggcatctgtcggtgcgtcagtggatcagtgatgtatcggatctgattcctcctgaatcctattgacaaccgcaagtagtgcgaactgaagtagagctcgtattccattcagacctcagccaacaatgtcctgccttgacttcgggctcgaggccgaattgtgggaacggttccgagcgagcagctaatcggtcccggtcgcgtcagctctggcgcgtcacccatgatcatacaacttgatataccctaaacggccaaacgcgatctgcttcgaccttttctcagcgcatcaaaggctcgggctaagtccacaaagagtggttgactattcggggcgaacgctcttcgcccgggaaacaataattcgatgcggatgtcagctatgcctattccggaaagacagcggattgagcaagtagccatttgatggtatctccatcttgatacaccgactcctaagagcttgttctctcaatctctccgtcttaaaatccgcacgatactctgaaatccgctttatatacagtaggttacacgattgcgcgtggcatcttttgttgtatgacgatcacaagcgctcaccgagcagcttgacatcgacccccttaaaactcattcttcgggatacctcggtgagtactgccaaccctgctaccaagctcatgcagattccaacaaagatggtcaatggcgcaaaaccgaaactgccaaagaccgccgcgtccgccttgagatccggtcggtacagcttggccgcgaccaaaggtccgacgatcgcggcgattcctcgcatgatggtgtaggaaatcatgacgtcggcgctttgcatattccggagacgagcaatgtcggtagctgaagctggccaggtagcacagaaagaaccggcggcccaaccgaagatcagggtgaagagcaggaccatggcgaggttcttggccaggccgaagaggagcaaagaagcgagagttcccgtgatgccgatgccgagcatgattccggtatacgagaaccggtcgcaaagatagccactgatacatacatatccctgtgagctctcgcgtacacagtttttctgcaatgttgcggctcacattgttacctctcccaagaggctcgcagcattgaaggcggagacggccccagtagaagctattgtgcggaagggaaaggacagtaaggcaagtcagcgtcccgtggtcttcgacatgagccgaacgaacttgcctgcgctactcaatcctaaactgctacagtatgttccaaggtagaaggagattgcgaaatacccagcactggcggtgagggtcaagagggcctatcgatcgaggtatctttatctgtccgttgcactatggcgatgacaggagaaaacctacgttgaaaagccatagcgtactcagcaggtagccaaactgcttcttgacgaccttgacgtaatccgctcgtcgatgcctgattttgctggtcaccctcgcggtaatgggcaatcgaggtcggatgccgatcaaagccggtccagctccgatcagaagacacagtgcccagatccggagagtccatgctagtccgaggttctcgagcgaagcgctgaagatgaaggggaataggagacctcctaaacccgcaccgctgaaggcgactcccatagcaaagccacgacgtttcacgaaccactgtggtagccacaagaggtaaggtgctgtacaagatcgcaatatgagtgacctatgtcccatttaccacgatcgctcgtatacttactggtcatgataccgcaggccaagccgacgacgaagcccaccacgccgacgagaatactggcgttggttgcaaagctggctcctacgagagcgacgatagcgaccgccaggcatactcgcatgaccagccgggcgtacgtcgggtgaagccagaagaatggacgtgcgagcgccggggcaaagtagagcatagagaagaggagcgttccgatggcggagatggtcaccgtcgactcgttcttcaggggactatgttccgaacgttgcaggtagtcctggaagaccgaccaggagaaggccggtccgaagcacatgagctgatgacgatcgaaagagaatcatcggccagtcagctagtggttcgtacagaagtcgatgctttgcagctcacctcgagcagatagcaactcgctagaaacagccatgcggcctttccgccatcgacgggtggcaaggcctgagcacggtcctgattgtcaattgcggatgcatcacccgcattcaattccacctcgtagtcacccttgttgacaagatccgatgttgagcctagcggggtcattcgaatgtgttcgctcacagccagagtcgagtcgatctcggatctcgagtcggtcgatctcgacatgatggtcaggagaataaggatgagggatatagagcttgcagtggattttggagctcttactcctacatagccactgcttcgaggcgagacgactgtctatatatccttccgttcaacgaaacgaaaagatttcgatgagagaccttgaacttggtaaagcctaactctggccgggtctaagctgatttcgggtttcggctgttgcgggtttggcgggaccatattagtcccgaatcgttgataccgaaggagccctcacctcaaacgtcacaaaagccatgttttacgcaaccagttcctcaacacagaacaataaaataattgttccgctactggcttgttggcttgtttctttggattccacgcatgagcagcgccattatcatgagtgatcgaattcttacctcgcgcaatcctcacgagtacatgatcgcctttcttgtggacatttcgtacgctcttcttctggctttttgactttcctctttttgcttctggatttgtcgtgtatccgagtctagcaaacaggaagacttgacacagtacacacaggtatgttacacttcaaaccggtgtgtacgtgcgtcactggtcagccgattgactgaagaagcagtagccgactatttggaagttcactcctacgaccggtccatattcaatcgctcaccttgtcgagtaccttcaacatcgagggatcatttgctatacaaatcatgaacgactccgatttcaacgctgccacggagaagctggacgatatcgtcgaaacactcttcccaggcaattcggccagtccgcaaacagctactctgatcgacaaaatatgcagagatttcggatgctcggagatcgatgaacaggccttttacaagttataacaggttcatggcgagtgagtaggctgcaccaggctggtcctgattcgatttttcgaattgccaactgatctgcacgcgcaggttgagcaggcgtttccagccaaccggtaactacttcgcatggtggagggaggctcatgctttgagcatgaagatctatctcgagttggctagtgcgtctctttggggaaaggccgggaacatgcatgttccgggggagtatacattgctacttctactgatcgcaagcacaatcgtccatcccagagcgaaccgaccaaagcctcatgtgaggtacctctgaacgaatcctcgcaagtagtaggctagaaaggagcaattgaagggaccgcagcccgtacacagaacgactagcgattgcggggaaaagctggtgccttgaacgagtgattcaaacatgccgtcataccgagtagagggcatgaagctgtacttgtcgtggctatttcatggtatttatgcacttgtacaaaaaaggcgagcgacaagtgaatacaatgtctcggaactgtacatccgaaatccatatggatacagtatctgcggtttgtgaatgcgattcatcgtttcttgctctcaaggcgcaacgagatgagtccaccgagcaatttgaggttggtctcccgctcccatgacttttcgctgtccttgcccttgctcacggccttcttgaccgaggtgtccgggccattagctaccgtcaccgctgaccggttctgctcggtagacgacctgttggcaggcgccgcctcctcctcgtctatgtcgaacccgatgtcgaacaagatcttgtctttctccgccggctgatagagtatttcttcgcgtcgactgagatcgaggttgaaaccgcctcgatagtcttcgatccagacggtatagcgctcttgtcgctccttgtcggcgaggatgaggtcgatgatccgatccgcaaacgtgacccgctcgtctattcggccgatgtacggatgttgaaaggccgaattcgctcgggcgggcaagtgcaagtgaacgtgcttgaaagcgtccagtgtcgagcaaacaaacgatgccgggtcggatagttcccgatgggccgagacgttcaggtaacgaatgctcagcgtgtctgtcaccccggccagcgctgaggccagctcgctaaacaacgcgcttgaaggccggagcaccgtcatgctaaacttttccggcttgagctgtccgagatgctgtcgctgggccgcgttggtggtcagctcgagcggtagaccgagcgctaggtgttttagtcgcggtcgagtctcgctcgggactgggatcagctgcagaccaaagtcgaacggcgggagcacgtcctcaaaaggcgatggagagtaagggtatagcggcacgatggacagagactcgaggtgtgtcagctggggatgccggatcagggcgtctgatgggatgcggaaagctaacgtcagcgccggagcgtgcggccaagtgagcaagagatgcggccagacgactcacacaacgaagtcggctccccgaagccttgatgaagttctaattcattcacaaatgagaagatatcgaaatcgggacgtttgagtatcttgtcgaattggcggtatctttgtacgccaacatatcgtgtcgttcggttaggcagggtgagtggccggtccagtgacaacgttgaagctccctgacactaacgaataagttccagtcagggaacacttggtccacagctttctcctgatatagtccctccattcagtgttcagtgtcatccacttccagctgctgagtgggtagccattcgctgatcgagtttctccgacgatcgatcggtagtgcggattgtccgggttgagcggattgttgcgatgtaggtcggcagcgtcatggagactaggtcctaagggttggaaggcaggaacaaagtccataggtggtaggatgagcctgtcggaagacgcagacgaagcacgtcaggtgctgcgagatcggcaaaagtcgaatctcggatatgaccgactctttgctcatctcgagtgccatttcgataatctccattcgaagctcgggtggcagtttgtcgaaagggaatggccggtttgtcgtaaagaccttgttcccgattttgaaagagatattggtgctggtcccctgaactgcattggtgatgccaagcgctgtcaaggagtaggggtcagcagaggtctgtctcgcttcgggttcgtcgatcttcagggacgtaccgacgttggccgtggcatttaccacgcttggcaacaatagtggtatcaagatggacatgttgaagcgaagtaaatgcgatacgaagtcagcatgagaggcaggtagacgatgtatgtcgctgtcgaggtatcaagaccacctttgaggtcgagccggttgagcaggctcggacggggatcgacagtagtcactgggcctcggaaggagattggaacgatcgatgacgcgccaccggaatcaaatcaggacattcaacattcgcagcgatatcatcgtcgtttggtttgccttggcatccggcgaaactgctcgtaacgtagcagacgcgacggtcgaatcgaaccgagagtgggggcatcattgacaagcatgacaaggttgacaacaagtacgtatgatataggagcgttccagttgtaaaaaggcgagcaggagtagatttagtctctcgacacacttacacctctactacaatgtgttgaacatgagcgaccttggcggcgttgttgagaacgacgcataccatcattgcgaccatcgagatgtacctactgacagcctgtctcggcctctgttggcaaaatgctggtgtcctgctggtgcctagcctacactacactgacgcccatacagtccagatcttggtcaaagcagaatcgtatcagccttgccttggggcgtccgcgactgcatcaggcggagacatcaccaccaaacagctagctatgtcgtacgatggaatgttacgctacggcatggttacaaatagcgaaaaacacgcatcgcgtccaactctcgaaaaacgcccaagcagagtcgaaaactctctaggccttgatcttgagctgaccgaggaacgccgatttctcctgcttcgactggaactttccgtgactggttccccccaaaacaaccgcacgtcagctggacaactctcaagacgacctcatacgtctggcaagcactcacccgtagttggacgaagtgtcgataaacttcaagctgaccttctccaagtgagtcctcgaggtgtgaacctggagggaaacacggagggtaaggggcctcttgagggtaccggggacacctcccttgaccatgacaaagtcctcgttgacgataccgctgtaaaaggtaggtcgacgagactagatcagtgacacgaatcttgacgaaagtgtccacaaatcaaacgcactagtggggccatcctcccaaggggttgatggtcttgtcggtaacgtcgtagtcggtagcacccgacttggcgtcggcaccgtttccgatcctgtagatcttcttgttcttctcggtacggtggtggtaaccgttctgaccggcacggggaaccgagtacatgacgttggacgggtgccaagctccgatacaggcgacctttcggagacctcggtgggtcttcctgcaaagggtgggacgcgcgcgggaatgccgtggttagccatggatgtgacggcgacatggcaagacgacgtgcgacgtacctgggcagacgggtaacaccccatcggtgggtaacaccctcggttccgtgacccgaagtgacaccgatcacgtcaatgacctggttctgctcaaacacgctcttgacgtcgacggtcttctcaaagtgagacttggcaaactcgaccttgtcggcgacgctgcctccgttgacctgaatctccatcaagtgggccttcttctggaccaaaccggtcttcctgatctgggtgtgggcgaggacacggacgacggtgcagtacttcctgattcgctcgagctcacgagcgatcgaggcaccgttgttctccgagtgcttcttggcgtacttggtaaaggccttcttcttggacctgtaccagttcttgtagaacctcctcttcaactcgtccgacaagtgctcggcccagacggtggtcaacgacctcaatccacggggagtctcgacgtatccgacgacaccgacgacgaccatgggaggggtctcgatgacggtggcagcctcgacgacctctcgcttgtgcatctctacaaagggccagacatcagctcaccgtccacccgggcgcgatatcacggcgtgcaagcgcgtgcataggcaagactcactggaaccgggtcggtccaagtcacggacgacgtgggtcataccggccttgtaacccatgagggcggtcaagtggacgggcttgctggggtcatccttggggaaagacttgacctttcctcggtgacgggcggcacgctttcggggcaagaacctgtgaatcgggagaaaagaaggggttagtctcagggtctggcgagtgcaatgcgggagtccgcggtggtcgagggtgtggagtggcgagcgattctaggttgtacgtctattctttggactggcaggacttccgggtggataagtcgaatatggtcttgctctgccctggccgtgtcttctggccctgttcctattcctctctgcctggcagatcatctccatcttgcctccttgtcccgcaactcgtcgcacgaccagactctgctcgccaccaccacgaccaccaccgcgacggaaagagcgatagatattcacccaagcgaaccggatcgaggctcttcgtactatcgagattgggaaaaaaaggaacgcggtaaaatcttccgtcaacatccagtattctagcgttgtcgatccgacgatcgggttgctcgactcaccttcctgtgagacatttttttggtggttgttttgttggttgaccggtggtttgacgagggtgccgaaggtgaacaacgggagagaggttgatgttgatgtaggagatcgactggtaatgagatgaagtcgaggtcgaaaagcgtcgaacgagggaagagcgagcgagtgagggaagggaggggcagagacgtggggagcagggagaggaaaggtttgtggcgtcgagacgacttgcacactatcgaggaggatagaatgaatgcggaaccgcggatacatagcgaattgtgtctctcgcgcgcgcctagcgagtcgagtgagaatatgaagatcgactccgcttagaagcgcaatactcgtcgtcaggtcaacgacatcaagcgcgcctccactcttgaccggttccccctccacctggttgcagcaacgcgagtaaactccgaagcgaccccacatgatctcgcgcggggaatgcggcttctcgacaaagggtgtgtttcatcgggtcaagggaactcgatgacctgcagcaaggatcgtctcacaaaactctcgattactcaaaaacttgttcctcctctcgcagcccacgaccacatgtgcgctgatcagattatattgcatgatcttgcgctcgtcacaatacactctgttgatacctcccattcgacgtgctaaccgcacaactggacgtagctgctcacatggattgcctcattcagcccttttgaaccgtatcatgatcaaatatcagcgagaattttcccgttccatactatttgaaatgcgcaaaacatattatcgccgtatgatgagcgatgtatgaccttgggacgatcgcagcatgaggggccgagggatccacagatgatacctccagcgtcaactccttgcggacatatcctcgttgctgcagagcgagaccacacccgatgggagcaagaagaaagaacttgacaaaaggttacatcgacccggaccgaccggacacaaaccgtggttccccctggtgtaacgccgagaacttcgtcttcaacgaagattagcgagattagctagagtttgaaacgccctggaactggaacgtcaagcggtttcccgtgcgcccgcttacggattgagcgggccacgtcagacaagtcatccgatattccccgcgggtcggatcgggtcctgggcgattcctcgcattgtcaatgatttcctgctacgagcaaccaagccagtgagtcggccgaaacctacctcgacgatccgaagcgggaccgttaacaagaccgtccggtatcatcaggaaatcaagttaatcagatcgagtataagcttctggattcaggaccaggcaccgctgacacgccatgatccataaacaacattcgtccagtgtcacgtcttgacctcgcacgatcgctctgcccgtcatacaatgtaaagcagatcaagcctccgatgcaggaaaatagtatgcgttagaattcccctgtttgtgtaccatgacagggaatgaagtctcatcggtcagtgcacctcccgtgaaaagtcgggctcagccgctcttgcacaggcgcttttcgatgacatcaggctacttgctcaaggagacaaacttatactacgggagttgaatcgatcgtaaggagcgggagggcgcttgccgggagccaaagaatcgaatggacccgttccaccaaaatcaatccagatgtcagtgaaacgtaccttgccctcgcgcagcgcggccatggaggcgatcgaggacgatccgagtcgttctgtcgatcgtctaggtcaaatgcatcgtatcttttgcaagaaacaccgagacacgctcctggggcggggaaaccgatgataaaatcgttaattgggtaaagtacccgttcgtaaatactggcgaatttctatgtacaagcgcaaccgcactgaatacaacccagctcgatgtccgacctgcttcgtcgtgtgattctataccagcatgacgagctacacgagcatcacttggcgttctgctccgcgatctgtttcatcattcctgccaaccctcctccgggtctcacacggacctcggagcgctgtcgggctggtgagccggtcgggggtgttttggtggtggaagagggtttcttcggattcgagccgccagacgaggagccaggaggtacgggtttcgtgggtttctgtttcgggcgggactgggctgcaatcggagcagacgacaaagccggctcggacggcttggtttccgacttctgaccgtccaaagagcttttcgacttgacgttcttgtcgccctgtgacccgacatccaacttgtccatccctttgctcaagttcgaatccgaatcctcgctcccggtcgcggtggaacccttaagcgcggcggcgaagagtccgcccggtcgagggtcctttttctccttgggagcaggtggaggaaccgctaccgacgtagatgaggaaggtaccgccgtcgaggccgatggggtaggccgtgatggaggtgccgggttggcagagacgctttgctggatcagatgtcgaagagcctctttcgaatcggcatttacatcctcctccgctgcatctgcagcttctaccttctgcgtttcggcctgatctgccccatctgccacctgctgctgctcgtcctcctcctcggagtcccatcccttcgcttcttcgagctccttctccatcttcttcttgtcccttcgtttctggttcttcctctgagcgggtgtcaatgccgcgctccccagcgcagggaaatctcctggaccgggaacgtccgcttctttcccgtacgtcgccgacgaccgagatgttgcgcccggtacgaacccttttagacgggaagtctctcgtgcaccggtgctcctgtaccgggccttgtcctcttccggagtaaagcccggacggactttgagctctttgcgaacactgtcgagttgttcgcgagtcgttggtaatcatgtcagccgtttcgagccgattgtggtgggaggaacatacgacagcttcgactcacgatccatcctttcgacgagtaccggcaatgaccctctccagcgattgagggtcgagcgagatccccgaggccgtcgtaggcatgctcaatggtggaccgtggcgggacatggtgggaatttctagagatacagacgtgcagatactgaagttgttaggtttctgacagtcgacgtgcgtcagaaggctcgtattcgtatgtacaacgtcatgccttgatcgaggtcggtgggatgatccggtcccagcctgacatttctatcgagtttatgctaacgatcgcgggtttcgcttccggatgattcgtcacgagctgggtctgaaacttgtgcacaggaagtttcaaaccgactcgatagactacctagctctgactggtcccggcatcatgatgatgataaatacgtctgttgtcgatctccgaggctggacatcgtcttccggtgacccgatgtgtccgtctacgactctctagcttcgatgtactccatagcggatgcttgcatgtgtataccgaatgagcggtcggcgattgattgcgacttgactcgtaacagaacgctggtacaatttgatatgctttttcatgtgataactacgaaccagatagcaccacgtcgacatgcgccagaagttctcgcattgacacgattccacgaagcgacacgtcgccaaaagtcagttggaacaaaatgccagttcagggatccttcgatcaggccagaaggagacggcgtcagctacctaatactggccatcatcatgagaagcttgagcaaagaataccaagctcaaacgcttcctgaaactgcgaaacgagaatcaggtcaggtcgtgcctcggcgaacgtccctccatcttctacccaacaataatacccttttggcgcgccgaagccaagcgacgcgtacttttgacttgtttcccggttgacgccagtgatttacgcgagcaccccggccccggcccggggaaactcgtggccgcgccccctggcaatccaccgaagggtcccggtcgaccggtccgggccgttcgaaacgggtcgatctactctaggatcactgtcgagcgtgaagacgattcaggtcaacgttcaggttataagcacaacatcgatcgcaaacgctccacagcctcatacattcgaatcgtactctacactctatctatcctgctctctttcgctcggcttctttccgcacgagtaaacctgaacgaacaagaacaaaacaagcaacaacgatgtcttccgctcaacaacctatcgaagtcttgatgtgtaggtcctttggccatcaacatgctcgtaccatactgacacctccccgaactggcaccacataacaggcggtactggagaggtcagttcggtaccagaaaggcttgctgctcgcatcaatagctgaaatcgagtccgctcgtcacgatatagtacaccactggatggaccggttcgggtggttcgcaatccgacaaaaaggtacgcgcaggtagaaccacctcaacccttcgttttgctacactgttctaatattcatgctttactcgtggtggcagatcggggtcgtcggtctcgtctgcttcgacctgcgacgacgaggaatcgtcggcaagctcaacatggtcggtacctcgggaggcaagttcccccaaatcagggaacatttgcaaaagaacatcggggacgtgtacggaatggacacttcgtgcgtatcctgaaattcgacctttcgccgatttggattacgcaatagctgaagcgaacgcaaccacgttcgaaacggtagatttactgcttaccccgagggcgacaagcgggacgccgaggcctataagggagccatcgataagcttcccaagggctccatcgtcatcagtcagtttacaccaaatcgtcatctcgccgcttcctctaacagcgcagtgttatcacacctaaacagtctttacgcccgactcgacccactacccgatcgccaagtatgcgctcgagagggaccaccacgtcatggtcaccaagcccgccacgcaattgttggagcaccaccaagaactctccaaattggccgccgagcgaggtctcgtctgctgggttgaacagtgagtccagacacaccgtgaccgtttcccttcgacgttcagagcaagctaatccgatgtggaccacccccggcagccacaagcgatttgaccccgtctactcggacgccaaaatgaggtccaaggatatcggcgatttctcctttttcaacagttacatgtctcaacccaagagccagttgcagactttcagcgcatgggccggtgtggactctgatatcagctactacctgaactcgcaccacgtaagtctcatcgaatcgaccttggcagacgatccgctgatgtcgctttctcgtcctatcgtgcctccttgcagatcgacgtccacgcctggttggtcgagggtctttacaagcccgtcaaggttactgcttccgcttccacgggaatcgctacccaggagccgtacaactgtgccccgcagaccgaagacacgatcaccttgttgaccgagtgggagagtttgaagcagcccggaaggaagggaactgctggtcagtgatcaaattgtaccggggcttaatcacttcaacggatgagctgacaggttttcgtctggacgtcgatagtctacacggccagctggaccgctccccagaagtcgggtgtgcattccgaacagtactggaacatggtctgctccaaggtaatttaagcttcttcgtgcgaggcagacggacaggtgattgacgattgcttgaaatgggtgtcatagggagaggtcgtcgtcaaccaggctcgtcgaggttacgagattggaaccgacgagggcggccgaaccgcttacaacccgtgggtccagcaagggctttgatggctgcggcggagttggtctttactgactctcctcgcttcggtcgttctacagcttctacatgaagtactcgcccgcccccgatggcacattcgatggacagagggggtacggatacgttagcttgagcacatgggtcgaggcttggtaagaatcggcaatgctagacgatacgaagccgatcgagcccatcgctgatccgccccacttcaaatttcgctcggtgcctacagtatcaaggtcaacaagggtgaggccaagcccgaggactttgacaactacggcttgcccactatcaagaacacgatcgtcaccaccgccatcatccgtgccggacgtgtctccctagatgagaagaggagcgtcgtcatcaacgtcgactcgaatggcgaatactctttgcaatagatgatgaacacgtcgacgaaaggccatcactagcagaacgcagcatgaaccaagctttaggtgtattgtcagatagcatgcacgatttgtgtacaaacatagaaaatacattggaacgtgattcacggctttggcctcgtgtgctgaacctgaactggttcatctcccttggtaataggctctactctggcgtccgggatgttccactcggcttccatcttttcaagtctctccttggcttgcttggctcgagtcgtcttgtattccggcttgtaagtctcggggacaggcaggtcttgctcgacaaaggctgcctcgatttgagtttgtagagggttctcgacaggctctctattcttggccatctccagcagttcgtctcgctccaaatatgagttgagccactcccggagcaagacgtctctcccacatcgaagcgagtacaggctattgaaggccctcttgatatcctgtatccagcaaaagaatggttgtcccacggtgaccagtccggtcagtgcttcgaactcttcgaggtcgtcgcgatagtccaacttgagactgctcagctcgtcggcacaagcgatgacctggtcctcgtcttcgagaaagggtaaaagtctgaagcgagctagaccgttgcggtagttctttgtgaattcatccatcagtgtcaaaagatgagcaccgtgaccttcttcgtcctggttccagctgtgacagtcagccccgggcacttcggctcactcttcctccaaactcacctcaagctcgtcgatctcgtctccgaggcttttgacggtgtctctcatcgaatgtatcaggtcgccagtgacatcgccgttcggcagatcagcaacccttttgctcttgtccttttgcctttccagccattcaacttgatggtcctgatcttttctcacttgcatcatctcgaactgacgaagggcggcgagcttcgaaaaacatttggtcggtcagcatgctccaaatcccaaagcaaccgctcatcaaaggtgcttactcgggcctgctccagttccatcagggcattgccgagatccgaatcgcgctccagtccacgtgccgtattcatcgctggttacgagtctagttgaaaatgagatgacagcgtaccgaaacaaacgtggtatggcgcctgatggaattgcaacacagacagcatcaagctattatggacctccaaacccgagcggagttgtgccatccgtaggcttgaggctttggtttcacatcgtcttcctttctcgccccttgacacgattgtctccttaaaagctcctcgaaagcgagggtttcgtatacatccccgtgtgaagtcggcttccggttcagcgagaccgtcgcagaccattgcacagtcgagcttttcgtagcgagacggtaaccgcttaagcctcaagtacgcgttgacagggtttcaactgtcgtcgttcagtacgcctctattgttcgatgagttcggaatcgttcagactcgacttcctcaaggcaaagatgataacgaacgtttgacttcaacaccgagtataaggaaatgacaatcgacctggtcgaccttccgcaggaagctgactgatctcgtcgggtctgtcacgccaggcgacgccaagggtgggtggctgggaaccagattgtccatcaaacgagtgacgtgctctataccgcgctgccgcacaagtccggcctcagtcgcggtccggccaagttgcttcaactcgatgcatactagtgagaggcatcagacggcacgcagctaatcatcgtgacttgaatgtgatatggccgcctcagagacatggatatgatctgctttgcatgcttcatcctgaacttaatcctctcgatcatcacgaagtacgcattctttgtctcgtgtctacacggtactacaggaacaggctagcatttccaaggtcttaagaggtgttgtcgtcctatacgatgcatgctatgaggagggcgtttcagtatcagctgcaatcaatcggtcgcttggcagcagcttatgccggcggcaaagcctgccttgattgtgcctcagtagtgcaagcttgtcctggcacagcgaattgcgttggtcgcctgttattccgcgtcgaccgactcttcctgggcaaccgccgcctcttcctccacggcagccgcctcttcagtgccactggtttcggcccaagtgagcatttcaaccagcttgatcccctggcaaattgcggcaagccccgacttgtggactgaggcttttcaaaatcacgcgtgacagaggtacagagatggacgaccgttgaacaagttacacatataacagctatcagtaggtcgtgtcttctgatgcacttgctaacgatcgatatgaccgactaccgatggtcgcagaccaacaggtatcttatgtctgccaactagcgacagataaggagaatgagaacgacaagcgatcgaagcaatataagtgacaagccaggaactctgctcaagaaaccgagacacgcacagtaaatggcaaccattagacctcaaatatttggtgcatgtgacgcacatcattgcctcgcggctgacgattggaagatcgtgatctcaaggcttgggagattgagactgatgaatcggtcccaacttactgcctgagagaaacgcgaatatgatcgtcttgctctgtcgaatatgttgattttccaatctgagatgatgactgaaacgccgcagatatcctaagaacggatgcaattctttgccgtaacacccctttccgactcgcttacgtcatctcttccccctttgaccctccgcttcggccgcgccgacggtgtctgccgaaagatcgatcatctcaaagagatgacgaaggtctaaattcaaaagatatacccccccatgcattcattcatacacactctcacatccatcttacaatcacccatccactggatcactcacctataatggtcatgatgtcaaactcgagtatatctccacggccatccctggatcgccggccacgatcctaaacttcacgcgagaatcgatcatagcaacctgttcccggtcacagaaacaccacaccccctgccctaccgacgattgttcactcgagctgacctcaaacatgctcaacgttccatacggcgcctaccacctcctcgcagacgacgtccgtcgacatcgagacatggccaacagcgatatcaccccgcacgcgggcaagtggaagacgatgatgcacaacaagcactcgagctttctcgtcaaactcaccattcacgatattaccaacgtcccgctcgtctcggggagtttcagtgtgaggtggaagtttagagggagtaaaggggatatcaacctcgagcgtgagtcctcaacaaacacgttccccccattgtcgtcgctcccgttcacctcagctgaccagcctggtgcttgacatgctccttatagcggctgggcaatccgaaccctcctctgcgacccgagcacaacgatcctcttcctcgcttcatcgcacattcaccgccgccttgactgaaagagcgcccaccgcttccccaggatcatccacctacccttccccatcatcaacggggacgtcaaccccggcactcgtccccggcccattctcgtcccaccaaaagacccagtctcagtcttctgccgatacgacgatgacgaccgggtcgtatctatcttcctcccaccctcatgcacacgcgcatttgggattaccttcccgtgggtccgtgaggagtttcttggacaaggagatcacgtccactttgctccccctgccttcaaacgtcatgcctcgtgcgtccggctcgtcaacccagcatcaacatcgtcatcctggtctccatcgacatggacatcatcgggatggccaggaaaggaccgacggggatgggcaagaggacggccttgggtcagggcatgaggatcaaggcgaaggcgagcacgagcacgatctcgatcccacgccagcgggaccgagctcgagatcgccggcgcgtctacacgtgccgcacatcttgttacaccggagcgagaataacagtcatacctcgttgtccagcgcgtttagcgggttgggcaggaagaagcgaggagcggctgtggcggggggagggagcgattcggggtcgacctatcagggcgccccggcagggaatcaggggggaggtagacaaagggtatcctccctcgcctcgtcgatcgatagcgtacccgattcactccgctctcaatcctcgggatccaggttcagcctcgaaccgcactcgcatgcacagtcgagcaggaacaatatcagtaatagcagctcatcaaagggagtcgtcaagctcgacgtcaacgttcctatcggtacagtgaccacacccaaaggaaggaccccgatccaagagttggaggatcacggggcgagctgggaataccatgtcgcccagatcgtaaggatcaagttgagacccatggacgacgaggcttgggcggcttatgcgaaaagggtgggaaaggacgtcaagaccggcggcgcggtcggtccgagcgggaacaagggatcacacggccgggctcgacaggtcgggtccagcttgttgatgaccaaggacgacctgaacgcctcgtccgagccagcaggctggttgggaggaggtgcgaaatcggacagcgggttgaagttggtcgtctaccagcacttggccgggatgggcctcgagactattcggagcgtgagcacgaggagtgaggaacacgatgatgacgacatggacgacggcgatgacggcgctcaagcggggaacggttcgtcgctcaggggtaccatctccaatgtgctggccaacggggacgagcaagaggatcacaccgggtcgatcgcctcaaggacttccacagccaaaccttcgcggcggggtcaaaagcagcagcagcagcaacagcatcatcctcatcgctcacatgggcaccacgagcacgatcatccaggcatctattttggcgaactgaacctcgatctggcggaatacgcgagtgaagagggcaggatgggtagaggtggagttacaaggaggtacttgttgaaaggaggcaagacgaacgccatgatcaaggtcggtcccagcgggccacgtccgtgtcagaaagctgtgacgtcttgactgacagttcctgcgctctatcagctaacgattgagatgtcccatcacgagggggagagcaacttcattacgtaggtgatggtgttgagcggctcgtctaacgtcgagcgatgaggtacgaccggtggctgatcgattcgatgatcaatgtccgcaggccaccattgcaacggggtcacaacgtggcagggattacgggagcgatggagaatgatattcagctcgaacgtgagcaactcgaatcatgtcagacccggctcgtaaacggccccatctgattcgtgatccgccgaccacagatcatctcgccaacctcaaggcgcctcacaactcggcatcatcgtcttcagtctcgttggtgagtcgacgcgcccgtgtgcgagatccaatccgaggactcgacgttaatgaaaatctgattcacgtaggcgcagagtcaatccagcatggtcagccgaaatcgcgaccagctcttacgcaccgtatcgagcgcgaccatcccgctcacggaacagacccggggacgacccaagaaaccgcccgaatcgcattttattgcacctgaacatcaacaccggttcaatcagctctatcgtcggggctaccgtaatcacggtcatcgtgccgttcacgacgcgctcaagatgggtcaccgggaacaccgacatcgacaccgttcctctggggcgtattcgggcgaatggtcagcagaacaagtcatcgacctgattttcaaccctttacccgtcaaccggatcgacaaggtcacaccattcacttactttgctgaagacgcccccgacgacgccgagagcgtaacccgagcggaactcgacgatggcgctgaagccaggggagagactgcctcgctcgccgattcgacgggaacgacgcacgaaaagcggtcccgcaagtttcttcaggtcttgggtggacacggtctcagatcgcattcgaccctgacgacgccgagggatgaggcgtcagaaaaagaaaaggggttgggcgcaatgaacgggggcgggcaggcgagagccagaccgagatggagcaggaacaggaccaaaatgaacgagtcttgatgacgacgccggagctcggggagttggtatgatgagtccgagatatcaaactccatttgtgggatcttgacgatccaagattacaaaaagacaaacacataattgacgactacatgcccggccgttcgttaaggctaggtctgccgcttcacctgatccgatgtttgcgagcgtcgttcgactgacggaattcgaacagggctggcattcgatctacatcgagtgacctttccatggcctgacggacgagtgacacttgaccccacaaggatctctgaggtgggcaggtcgacacctccgagcgattccgggtctgtccatgaccttgagatcatggctcttgaggtaggctcgaggacatcccgatggcgagctacagccgttcaatcgggttctagtttgtggttcagcttgaagagcttgctccaggtgatgccttctcacgggacgagcttcatgataccctgttctcaacctcaagtgacaacagtcagaccgaaagctgatcaaaagtattggttgtgtcggatagcatgacacaactatcgtagcttcaggtaggtatcacgacgcacagcttcatccgtaacggtctcaatctttcatgacgagtcgagctcaagacaagcccttttcgtgctactttcgctcgacctggattccgatggttctcggccagagtggcattctttcgcggatattcggcgtagatatccctgagaactgactacccaaagtgtcgatctgaagtagtgggcacgagcattgggtaacgttccgcactctccgtctctttcttcaaatgcattaccgtcctcatgtcgtcgaaagcgtacacatacacacacgctctcaagcatcatttcacaagcttgtcgttccgatccttttcctcgtaccgctggtaccttggcaatccatcctcagggataacacaccagtcaacccgatcttccaaccagatgtgactcgtcggcctcaatgccgtttgatactcgaccttgtccgcttcagtcgtcccgtcttgcggagcgacggtcaacaaggccgtggggaccgagatgatcccgacgacgtcttgctcggtgatcatcaccggcgtcccacattccgcacacgagtttctcgtacaacatccggctctccgacggaccaacgatcccgtcgtctttctttcgccatcctgcttcaaaggttcgggtttggcatcttcacggttgagaggccgatgttctccttgccattcgagggcatgagcggggaagatgctccatgtgacaaaaggcgcggcgtgaatgagcctgcacgatttacaccaacagtgtacggtggacgtcggggtcgagttgaacgtccatctgaggtttgcacatgagcatgaacctgagtatggcatggtttatatactggatggatgatggactgtctggtggctggtggtggtggtgatgatgatggcatgtgaccatgcatatgcataggtatcatcttgttgcatttgtcgcgtggtctgacatgagtgatggacatggacacggaccggacatcacatgttgagacggtcaacacaagtcttacctacctacctacttactactctgctttcgccatcaaacgatacaccgtcactacacagtgatttggaccctgcctctcagtcaaacctccgagcagacgtcctgtagtgcacacccataggtaccaacacgaggcaacctaacccatttcgcacaacaccgacgcccgttcgacaagaaagccgaacatggcggtcagagcgagattggccgacgatgccacccggtcaaaagaccaattcctgaccgaattgaaagaggtcaagaacaatctcatcgggaatgtcggcaagaaattggccctcgtcgaggaagacgggacgatcagcttgtaagccgcctgtctgtcagagcgctcgcacgaccaagaggcgaagctgtatcatcaagctgaatcgactttccctcgaaccgctctcgctcggaaatgatcatagcatggtagaacagatgcgggaaacagccggttcgctgcgagctccagatccggcctcgacgaccttgccattgaaggaaacgatgctcaagctcgaaatcctcaacgagctcgccgtcatcctaggtgccgtggccaacggtcagtagaaaggacccgggcatttccagtggggactttcgagcaagaagagcatgctgatttctcctcgacattgatggccaccatctagctgggagcctggcactcgtcgaactccttcggtccaacctggccatcatgttactcgcgagcatgagcatcgcctaccccttgtctctgacttgccgagaatcaaacccgaccatttcccggtacatccataccaaatgtctcccctccatcgcccgggcgctgagaaatcacacggtcgctctcggggatttcgtctggggtcacatgtggggggtcggagtggagatcaagacggaccccttgggaccggccggcgagtcgacatcgagctcgagcgggatgcagagtggcgttcgaaaggaagctaagggaaagggtgtcgaggtggatgggatggatgtcgacctaggtgtcaacaaggaggcggggctcagtcggatggacgatgtgcagcaacaggccatcgaggtattgacgggaatattcaaggtgagccacaccctgtgtgatatcagctgtctctcgaatgcaaggggagctgaccatacgcttgaacgcatgacatgctcatagccgaggtcgctcgagatcttctcccccatcctcctctccggagattcccccttgacgttactccccctgtatcagatgctcgctcaccttaccgtcatgtcctggcaacgaaatgccctcatcaacgcatccatccccttcagaccgcccccaccgccgttcggagtcacctcgagatgggccgtcgcgttcagggacgacaccgatgcggacgcttggtacagcgttcgaccgctcttggtgaaattgaccgacgtcgtcatggacaccgagaccaacgtcaaattgaagcaggcggctctggatctactcggcgcgctgtgcaaggacaatgaggatatcgcggccgaggcgatgcaccttctcgacgtcgacgtcgatgagagtgaaggtgagtccgtgccactaggtaattgggatccctctgatacactcgggctgatcgcgcaagacctcgaaggatctggaaggtacaaaacgccagattacgcccagtcgattgcgagctcgccagcaccccgaaacacggtcgcgcccgtgttcgacgagctagtgggttccaggtcgaatgggatcgctgtcagcgccgcatgttggtgcgtacacgaaaaggaagctttctcgcctcaaagaggcgtcctgacgtttcacacgatcgcagtgcggccaatatgctcttcagtatccctgccgattcggcaaaggcctgtcggaaatacaaggacgggatggcgctattcaagctgctcgtgcatctgctggaccagaccgtcgaggataagatccggatctgtttcgtcatctgtgagttcccctctttcggcccgtctgaagcatctcgaaacgcgctgactatagcactttacttatagctcacctgttggcagacgacatggacatgcagaggcaggcttgcgatacgagtgccttgagcaaggtgatcgcgatcatcaaggagctggataccgatgtatacaagggggagacggagaacaacaaggccagattgctcgaggtaagcatgatgcaatctactcgacctctcccggccgagctgacgaaacgtgcctcccccataataggccggactactcgccatgaccagcttgggcttctaccacgaatctcccaagtctatgatcgccgatgcgggcatgctacagattaccaagaaagcgctatcacatccgtcgtacggggtccgggctgccgcttgtcaagtcaccagggcgctctcccgatcgacggccatcctcaggacgaccctggtagatagcgggatcgccgatcggatcctcgagttgttgcaagaggaagagaaaaaggtctcgaagcagcaactcgatacggacgattttgccaatgccgggcgggatggtaggcgggacactgtcatgatcgctgcaagtgcagccctatgcaacttggtgggtgtcgaactggaatcgatcgatcgcccagggcgagactgacccgctatcctcctaatagatcaccgaattttcgcctatgcagattgtaagcagaagtctcagcggcatccgtgatcataaactgatccttgggtcgacttatgcagagcatgatcgacaaaggtggaattgacttgctggtccggatgtgcgactctcctagccaagcgacacggatgaacgcgttgtggagttttcgcaacatgctctacaagaacgagttcaaggtcaaggtccgggttatggaggcgcttacttggccgatcctgcatcggtaagtgagacgaaccaggccaaacgaatagatacccttgctgacgttcagacattgatgttagtcacatcgacgatccctctcacgatctgcaggagcagggtctggctttgctgaggaacatttgttgtgaaggaagcgaggaagaaatcgaactcgtattcaacggtttcggcgaagcccccctcttcgaagtgatcgagagaaagctcgccgccagcgatcccgattgcctggaacaggtgagcagcgaacgaacacgcggacggaccggatggatattgacaagttgtctgcttcagctcatgtttgtactgtacaacatttgcttggggaacgagaagcatcgggaagcagtcttgtcacgagcagaagtgtgcaaaggcatgatgcatgcattggtgagctctagtttttccgtcactaatactgaaagagcgctcatctatatcggctaccggatctgtcagtcgagcgaaagcccgttgatcaagatccccgctatcggttgtttcgccaacctagtcgagaccaatgatcgacatcgtcgtgagtagtcaatggacagactcaaaccgactcggccgactgatttcccgctctgcgcaggtccccgacaagacgtcatcgctcgactcaagccctacatgcttgaaaaccagttacgagtcttgatcacagatccgactttcgacatccgggacaaggcgtctcgattgctcaattgcctcgaagctcctggcggtggctctcggtgattgctcgacactttcccctggacattgacccatccttgaccggtatacttttgctataattctcagtcgtttcggctgtgctcttatacctgtaattctccgcttgcggcctagtctcgaacgaactcgattgatcgtctattatcttgtattcacgtgtgatatgccatgcagagttgtatgataatgcgtttacatcccgacttcgaagcctagtctacctcgatcatgtcgtcttcgatcggtactggcttcctctcgagcggcgtagacgttgtggcggagacaggggccgcgagtttggcttcatttttgctctcagtcttagctgtcgtatctacagttgcaaacggaaaaagagatatcaggcacactgctcttgctgtcccggctcgggccgaatgtaaacttacccgacgttgcaggaggcgctttggcaaacatggccatcacctctggaacccattccttgacgagatcttctacggtggacatgaaccgcttgcagatgaaagaccatgcggtcacgctcaccgagcctatatcacaacgagccgaacatgagccatcatgaaaaacaatagcaaagagaaacttctaatgcttacccttgggtcccccgccaaagctcagcaaccacgagaccgctttaggggtccagccgtatggtaaccagaatacaggttgacgtcggtaataccagcagagcaccagctgaagccccgaagtgaagatgtaaagcagagtggagaagagactgttgaaccgggatcgatgggaagacaacgagccgtctgcaaatcaggcgcagggtaagcataggccacacccactttctgatgatgaagttgcattcgatcaaacttactgagcttttccaaatcggccagccccttgtccaactttcttctcagcttggcccatttagcaaactgatcttgcgagctcgtagcattcagctcggccttgttggcgaggatttcctttttgagcgcacgttgtttcgtgtaagacggtctcaggaagaagggctggtacgcagcaaaggcctgcagcgaggtaaacgatagcggatcagtcgccaatgtacttgatacattttcatgggtgcgagacttgcgagttcgagaaggaccgatttgccgacccatgatacgatgttggtcgcaaagatgaccagcaggatgagcagggcgagctccatcttggcctggaattgcctagctgagattctcaggtacgagaagttgagctcgaggtgatcgcacgatagtgcgttgctaaatcaggcatagtcccaacaatgctatagcaaagatcgttcacttcttggtcgagccccaagtttgactctcgctggcaaccggatcgacctgcgcgcttgacgcgtcaccgaaactcgctggaactataattccggtccaaacgatcatgtggacaggcgggggcggttatacccatgtataacgtgcaactcgatctcattcgcataaacgagatgaagcggtatcgtgcccttccttatcagcggactggttttgcggattgtttcattcgtcatacatcggacaaggcggacaatgcggcttcaagccgggaaacgaaatgctatgcgagccccgtaagggtaggcagaaagagaatcaaagagacgagcgatcgaccaagctagctggttcgagcagcgacgtaacggacggaaaataaaagaaaagaggaccagagacggtatccactctttcacgtcgaaaacgagcagcgacgagcgcgtccatcgacccgggaccttgaaaaaggggtggagatccccaggacagagggatgtcttggatgtgtgcaaaatgggcgaaacgacgcttcgtccgggtcgaacgaaaatggtggatcgcggtcgaaagaaagagtcgcttgttgttgttgttcgttttgaagagtgaaaaggcggtggtaccgggctaagctgtacgtggtcgatccgcctagacgagaccgaagaagccgacggcgagagctacggcggcgaccacggctccggcctgtgtcttgccagctccgttgaggttgaaaccgactccaccggtaggtccggtcccgttcttcccacccggtccagcagtctgcaaagtggcggccgagaggagggtgtcgacgacctatttcgtggggcaccagtatgatgagcatccacatcttgccggatcgaccgatcgtgaaccggctactcacatgcaaaacaccacctccctgcagcaagacgtcgctcctcaagatcttggccgagctgtacccgtccgagctgatggcaaaggttccagacgagttggtggcgaacgtgatggcgtttccgttggacatgaagactttggcgccggtgttggcaaactcggtcgagtagacggtctgggtgggcgagtactgcggcgcgacaggtaaagatctcgacatcagctcgagaacgagtcgatccggaacaggacggggacggctcgactcacgtgtccggccaaaaccttggaccaggcggcaacgtcaccactggtcatgctcccgtcaaaggcttcgtccacgggggcgaaaatggtcaaccccttgctcccacccgaaccgaacgcggtcaacgtgttgatcgtcttggtgttgctcagcgcggcggcgtagagggcgagtccggatttcttggccgaggtcgaggtcgaggtggccaagcttgagaggatggtgggcaagctagccgggaccgagacgatctaccgtaccaaacgtcgtcgtcaggatgacgatcgttgaacggtatgcccacgttccgaccgagtcgggactcacggtatcgatctcgaacagttccaacccgctcaacgttcccgagctgcttccttcgtccaagctgtccgacttgacgaccgcctcgacagggctgaccaccttgagcgcgctaccgtcttgttgctgggcgaccatgacctgtccatccccgttggcgagggggaacagggtctcgagcaaagtgtgcgaggacgaggcgttgatggccgaggagagggattggggtacggcgtgataagtgaagagcgagtacagggtcgcagcgtcgagcgacgagtagggtgtggcgagtccggatttggtaaatgcctgcacgatcgcgttgccagaacaaaggtcagcgggagttcgtcctgcactgaagggcacgactgaaacacaaacacgcacctcgtccgaagggatcaacaagctccagttatccccagctccgccattggcggtactctcccacatggcctccaagacgtcgtacccgttctcggtgccggcgaaaccgacgacgacctgttccattccaaacttggcattgtcgtgcaagacctggaggagcgagttgatccattcgtcgagcggggtcgagggcgggttgggcgtctcggtggaatcacacgagagctggaaggcttgttgttggtcttgagcccaggtcggggtgaggagggtcgaactggcgagcagagcggcgggcaggacggtacggagagagatcatctttgtgatggtacgtctttggtattgagcgtgtgtggtcgtgtgaggttgatctgatctgattgtagatctaggcgagacggatcgggtggtaattcgtgatgaaaggaatgtgggggtttccgtcgattgcgaggacgaggtcgagcgagtattactatctctaggttgcaaaggttattgaaatcgatgtggttgttggtaagaagagggtatcgtcggttgaggtttgatgtagaggatcttgaatgagcgtgactaggttggctgaataaaggagtgtaaagtaaagttgaggatggtcgatcttccgattatgggccagggtagagtgactgtcggtggtggtggtgtcgatggtggttgctgtgttgagcgtcgggggtcaagttgtcgttgtctaatgtcgatccaaaggaatgtgatgttgaagggggatggtcgagacggaaaagagaaaagaaagggaagaggttcgtcgtcgtcgttgatcgttgatgatggtgatgctgattctatgcgggggagagaggaggggggacctgtcgtgaccggccctaccactcttattcccaaagttcaactttttctgaccgcccccaccccgacctgaatccccgtcgtccacccaggtacaccctaccccgtccttttctaatcggagcttgggacctgcccagctgaaacggacgacggatgggtacccaaagatcggcgaaaaggcggatcgcaggtaggtctgcgtcttggggtctacaaccggggggaatagggtcgtgtcgcgtcagcgccagggttcagggtccggttccgggtcttgagcaagacgaaccgatcgccagactcacctgaggggtatccgctgcccaaagcttctctcatcttcggttctgcctcggcctcgttgtcgacgtcgacgtcggcatcggcctgggatcccaacaacccgctcgtcgtcgtctcatcacccccacgtcccaacgttctgctccctcgggcgccaagtcggacacgtttccgtggtcgagacggaccgtcatcgtcctcgtcctcgtcgctcacgtccgtacccgccggagtccttacatcgtcgtcgacgccaacgtcgtcttcgtcgtcgtctacctggacttgcttgccctttaccttcttccctcttcccgtcctgcccttgcccttgcccttgcccttgcctttcccgctggatccttcccccagatcctcgtcgacatgtagaggcaccatcaactcgtccctctccactcccttgccttcgggatgcttccacatctcgatccatcgatcccgggtgaccttggccacgatggaagccgctccgacgatcttgtacgtagagtccgctttcgcctcgacgacgatcgagagatggctgtcggcgacgaaaaggggtcgtggtgagacggtattcagcaggggtatcccgtcatcatgtcgatctgctacgactcgaggtgcggactgacgggaagatctgtgaaagcctggactgccattgcgcagccggaccgagggcgtctacatagacctatacgcggatgacgatatcacgacccctaaccatcatcagtcacttcctcaattgcgtcaagcgcgacaaagtccgagctcggtggacctcgctcacctctttgagattgacaccccgtgcgagcgcgtccctgatcagaccgatcgtcgcctcctcggcctgcctgttcaggttgacgggcactcggcggagcatgcccgagctgatatcttggggcgaaagagtgcgtgacgagtagaccaatgatgggtggacggaataggcgttctgtgcgaacgtgacggtcgaagaggcgagcgaaggatcaggaaaagtacgcatgggggccagcgcttcccggtcgacagggctgactcacccatagtgcatctcgggtttccggggagagcgccttggagtctatgttcgatgccataccacggcgtgagtcgagagtggcctgatcacaagcagagttgacgctcaccatcaaatcccagggattccagcgtgggcttgaaggagatcggacaataagccgcggcgtacaccatagggcccagtacagctgatcgacagtgttccccagcagcaagatcaagatcagcgcgatcctcgactctaatacaccatcacacagtcgatggcaatggtgatacctacgtccgcgccccgcttcgtctattcccaacatccaaccttgctcattgtcactcctgtccttgtcgagttcgagcaggagccagtcggggagtggagagtgatagctgtacgagtctatcaagggccgcaaaggccgaggttcaatagggtccgacatctctgggttggtgcaagccggggtctgcgagtgatggaaggatggtaaaagacaaggtcgaacagaggttctcaaatccgactagatcgtccgttggggtcaaccatcaattctggcatgaccatgtgcaagcaagtgatatcgcctggatctgggaaacgcgtccaagagcaagaaagacgcgttttacgcgttttacgcgttttgaaatgacaagaccagggtaaaaaacacgagtatcaagtctcaggctggcgccgtagggaaaaggccatgggatatccccatcaccgaaatgtggtgtagagacaaggagctttggagagtcgtcacaacagcgagtttcgagggtcgttgtccaaatggggctggagcgaagagagacctgcggccgtgtcaaatcgcgaggctcagcggcatggtcaagattttacgtcatgacctctcgaccccccggcgggactctaggcgctgtcgcatcggcttatatcgatcagctggcccacagagacgtctagcctcgacctgcacgaccaagatccgactatggcgacattttccgacctcccagtctctcggctccccgagtacgagaaatcgcagtccaggtccaaggtatgaagggcggtcggtcatcccgctgctttacttcgcttccggcgcgctcgctcgaaccgccggccggaatcaggttctagcttggcccccaaaacgatcgttttccttgtacgtacattccaacacacacatcaagtacgtcacacatcacacggaatcatctaccatcgtaccctcgtccaggtataacgaccgatcgtaactgtagtcgagtggttcaagtttcattgactgcctgtgtgttcggctgtgtttgcttgtaatctcggcaacttcatcggggacgacaagctacgagccccccccccccgagccgagcgtcgcgacacggttctacgggttttggctttggcttggcctgggtggtcggtcagtcagtcgtccggcggaggaaacgaggcgacaagcgtggatcagccttgcggcgcatgcaccctgactgaggatatgatcatcagacccgccgggatcacactcaagagtctgcttatggccggtcgttccgttcgacgttggatcgttgtcggtgcatcaacgggcgtggtcctcctgtcattagaatcatccatcgtcatttctctcgttggccgggttcccttttagcacacttttgtatgtttgtgcgtgttttgtatgcgcgcacgcaaacctctctctctctctctctctcacggaattaccgacccgtaaacatctttcgcttcgatcttcctcatcaaccgaacccaccggacatcccatcgccatcgcctcctccaaacatctacagtcgaaaaaaacaaatcgacgctagtgctcgttctttggactacgtctacggctcgtgcaacgatcccgtctgtacttgacccccgactcgaccgagatctcgagaacgggctaaagatcgacattccctccccgcccggattctcacgaagatctttcggctcgatcagctcggcatccccccctcaccctcgttattggaatccatagaagacggccgagataggtggttactcaacagagccgaccggatcgctgctcagctcgactcggacgaggaacgataacggcgatactgtattctcgagggcgatcagcaaaacggtggaatcataaagcgatggtcttccagttccgcctctaacaagaaacggaatcgatagcgatactcttcctcgaaacagtggacagcataagattcaacgagagcgatagacagccaccctatccttgcctcttggagacgctccgacgagcacgagcgaacgttccccacgatcatttctgcgacgacgacctagtcgttcctcccatctcgctagacgacagggctgaggcttttgttggtgagcgatgctacatactcgttacgctcgacaagatctgtccatcaatcacgacctacgccggaaagacgaaaagagccttgccgccgacaacagcgtcgtcatcgtcggtagcgagactgaaagacgctcagagggtacgacggacctcgcctttgagggttacctcgagcggttcgaccaattagacgggtcggaaggcgttcaacaggctcgggagtgtcatcatcggcctcagacacatcatcaccagttcacccaatcgacctcttcccaagcctcgtcttcgtcatccctctcgtccggcttgcaatcgggccagctacaggatcagccccgatcgaattaccctccttacccttacccgggagaccttcatcgtcgacatcgagacgacccggaggacccggtcatagacggagacgctgggaggatgccagaaatggattctccaggcaagacgagcgatctgagcagttccatgtggtcagtctgcgacatccttctgctacattgtgtgaaactcccgctgaaatttcttgacggatgcctcgcgtatatgcagttcgacgccctctgccttcagtgctaatttgcctttgaacggtagttcagggtgagtcgcatggatccgttatatttgccattcactcggctgactatcgtcttgggtggtctcgtagccgatccatctttcccatgtcgacccacgggtttaccccatgtgcatccccttcacccgaatccggacggctcgtcctcgatcttacgcactgcgatgacgacaccatgtccatctcgcctcctctgccagtcaccatatcatcgcctcgcgccgagccggtggggtcaacgtcgaggctggtgccgcagggcctggtcatcgatctcggcgaacagcgacggcgagacatcaaaaggtcggatgaacaggaagaggtcgagcgatcgagcccgaagcacagaaagtttcccgccagcgctcgaacttttaggtcctgcctgtccaggacggtctcttctccagcgaccgaattggcacatgcaactgtatccccggccttgatgacaacgacaacgttggacccggggaccaccccatcagcagtcttgctaccaccaagactattcacgtctcgatcagaaagcgagaccctgtcaacccgaagtcatcgagccgcttcgctcatccgacccgccgagccaactcgtcgagtaaccttttgcgagaaactcccctcgatgtttccaacacatcctaattacgactatgatcgatcccctcacccggtcgtacccagactgagctaccgggacgtactcgaactgagggagatgaaggtcgagatggcgctcgtcaccaagcgtcagcagggtgcggcgggattgaccaatgacactttgctgcctagtaacaaggcgggatcattgcgggacgccgggctgggtttgcagacccaccgagacggacggccacattcgcccttttccctcttggaggacgacgaatcgatcgaaaacctgcctccttccccttcagctctgacctcatcatttccttcatccatcaagctggtctcgaggttgcacgaaatgggagaattccggccaccagctcgggaaagggggatgggcctcaaagtcgagccgacattcggtctggacaggatcgcaagcggggacagtttgcgagacgatttcgccaaacacatgagcgggaacggtgatggatcagttcattcgctcaggagaaagacgagcggcgagtttgcggtcgaggagagcgaattccaaaaggaacttcgaaaggccagggaagaattggaagccatcgcggtgcaggaagccagacttggcatggcgtcccagttggggggtgccaagtcgaacaaaggggagcaacatagcgttgccatgggtagcagcgggagctccacgccacttggtttgggcatcataaggccctcgcccaatcttagttcagagaacgttggtatggggaatcggtcgagaaagtcgtccttggcgtctcaacaaggcgggttcgatctggcgggaactttggatgccgccaacggagcagtgcctgacggcttgcctttggaacggacatcgttggcgccggtacatcaatcaatcaagtctggaatcttgaacagcggtaacgactctgaggagggatcattgctgtttcccaccaaaaccgccgcgccgaccacaaccagaccatctgccaggatttctagacccacgcccccccccttgcagagcaagaatgcttttcgacccccttcgcccatcctcgcaccattcgccaggtcagcaccgatccgcgccaccacacagcgttcaaaggccctcggctcagcgaggcctcttcagcaagacgcgaccgcggggagtatctttaggcctccgtcacccatcctcgccccatacgcacgaagctcgaccttgcagtcgtaacgcgcgctatccggtgccaattgatggattcttggccacacatgacaacgtctcgcacattcacataacgaccactttccgattccccgccttcttttgctctggttgttttgtctagcatatcatacacctctgcctctcttgggctttactactgtattcagcaatcttcccctatgcattcatgtcacgacctgttccttgcttcaaaacgatgatgatggtttcgatgatgatttcgatgatgactaatcaaaaaaagcgatcgagcgatcaccgcgatcgacagaggtcgtcgcagaggacaaactgtgggaaacttcagctgggctctgcagaaatttcttgatctacgtgattaggatctatcggcaccaaccgctctttgcaacccaatagcagaccccggacgacctcgcaatgggggtagcaggcttgacgacctttttgcgcgaagggcggacctcgttgtcgaccgtgaaccaagtcacaggggtgatcaatgattcactcgtgaacggagagttggaaggtcgatatgcagagcctcctcacggcgaatggacctcgcttgtagtggacgcttggtcgtaagtacttgaatacgataaagcatttatcccctgagccaattcgtgctggatatcgctccattcagattcattttcggcctatacgaaggaaacgtgccatggactacgggaggggattatcttgcgttcgccaatctaatccgaaagaccatgatctgctggaatagggtcggtatagtcccatactttgtgttcgatggtgagatcctgtccttgtcactgtctgagccccccgcggaattccaatctgatttcatctgttttcctaggtccgcggccccgatcaaagcatcaaacaatcttgaaccgtatggagaatcctctcagggccgcccagctattctacaggacgtcggtcacttcccgatcccatccctcattccagcgggacgaagggttgctccccccctttgcgttacctgtcctgaacgaagttcttcatcgagaaggcctccgggacggggtgcagatcttccacgtcgcggaaggagaagccgatggatattgcgtcagtctggccgaagagttgggcgcctttgtgcttggcaacgactcggactttgccatcctcggtgccagcaccgagaagaccggataccgaggctacgtgccgatcgagatggttcagtgggtcctcacggaagaggagcccgcgtcgacttccaccgcctcaacggtcgctggttcggaattcgacgacgatgatggattcaccgcggtgaaacgaccgaaaaagcgaacgaatcgacgaggattgatctctagcaattcgacgacgcagacgcagagcgtcaatggcctcgccccacccgcattgaacatctcccctttccctgatgcggtgaggacgttgaaattcatcatgccgacgtacagtcctgccacgctttcgcaacgactacggataccaccgacacatctccgcctcctggcatcgctcgcagggaccgaccattctccgcctgaagcgccggcgctctttttcgaacacagtatgagcaagccgtcccggatagaacatacagccaatgtcattcgagagtgcctggtacctggcgcttcggctaggttgaaaaggaaaaggttgcctcactacgttactccggcgatatttcgtcctcgagccaaagacgaatcgattgccgccttttctgaagcggaaaatgggtcagccatcgtcaacgctggcgacgagctatactcgttcatcgctttggtcgtccagtctctcctgctgagaccattggccaaggaagagatgttgcacgacctcgtcatcagcttgatcgaggcgacttgccattacattctacctgggtcccccgtcgagctaggcctcgaccttgatagtattggatcacctatcaccggttactgctgctcgacgtacccctattgcgtctgtcatccagtggaaccagtcggaccgtcgatcaagggatcggtcgagcccgaggaaacggagttggatctggcacgccagctttatgcgcgggccaataaatcgggctatatgaacaccttgtcagcctacctacactcggatcggtcttacctgcaaagctgtcttgcagatccggaaggccagccattacggtcccttgaggaagccagcggtgttcgaatcacggcttgggaaatcttgctggatgccctgaggtatttgccttgcgaggcgaagacgggtcagatcgaggatgagatcgtcggccagcccacggtggacgtaaatgaagacgacagtaccatcgaggctcagcctgtgcctgccgaacagaacgagaaacccgcagaagaggacgatgaaggtctgccggaagtcgaagatggcaacttttacgtggtggattatcttcgcctggggtcctccactcgattgaccgagttctacctccccttgttcacggaacctgccgcatacaatttgatcgccatcaaacccctgcaagaacgctttcaacacttcttgagcaactttggtctcgccgaaggcaaagccgtacatctgctcccaaaatggcaagtcatggtaatcatggtcagactcgcaatcgatctgcactccaacttggctttgaagcgaaaagcaaagctcttgacgcaaaaagaagttcgccgggcgatcatcgccgggctgctcagcgagcgcctatggacaggcgggaagcggaaagcacaggaaggcgagcggctcatgctagaaacgcggaattgtcacatcgtagctctcatcaccacggcggctcaagaagttttacagctcgcccaggccttgcggctgcacggagcagagattcacaacacaaccgaagagtttgttgatactcgtagtgccgccgatcattcgatcgcgccatatcgctttatcgagggaactgtctggcaccagacgttgacctccgcggaggagatccctctcgacaaggattccacggccattgtcgaaatttgcatgcaagccgtcgccgaggggagggagaccaagattctcgggtggcgagggtttgctacgggtaaagacgctgcgaaatcgcctgtgcagagtaatggtaaacgcagcgatgacaaagtgaaagcaaaacagcctacgagccgttacgatctgctggccggagtgtagcggaagtagtccaattcagcatacggttgtaaacgagtcgccaagtgtatcacaagtagaacagagttgggtcagatgtcgtataagccccattctatgctatacaaaggccgccgaaggtgattcgtgcgtgcccaatatcaattatctacatcttgctcttcgtgctcatcgtccttgcctcgctcttcgggccctggccgcggcgaccctcgcctccttttcgtgatctaccacccggcctcgcttgttggccgtcggtttctgcaaaggtgccgactcctggaagaccgacctgtcgacggcatccatcacgctcgagggcgaggaggcagtagcggcggcaggggtactggcctccctgatgacctcggtatgctgcagcgtcgacttttccacggccttcttgtccccctttctcgccgccatcctcatcttcatctgcctctcgctctcatcacgggttcgcttcaagaaccactctttaccctccttgatggtatccctgagggtggggggaggacggggcttgtagccaggaggaaggggtacggtagggggttccttgatcttgaagagcttcttgaaagccttttgacggaggatgaacgcttggagcagcgtcaacgagttggaaaacgtccagtaaaacgtcagtgcctaaccgaaccagtagccatgaaatgtggtcagcatggcatagcgtttcgacccgatcagtaacgaaggcggactgcaggcacttactgaagccatgtgggcgacgaatgggatggcgaggacggtagcgaccctgaacacattgatcgtgtgctggttctgtcgactcttgttcgtccccgtcccgtcggctcccatctgcatgacagccaacgtcaaggccatactcgtcacaggcaagatgtagtatgggtccgccacggtcagatcggtgaaccaggccaatccgccctctttcagctgagggacgggaagtgcgaccagttttcgaatggcaaagaagaaggcgaggaagaggggcatctggagcaagggtaatccgagacttcgaacggggtggacgtcgtgctctttccacaattgcgccaactgggccgcgtagacctgtccggcctgttgatcacctcgacccttggactcggtcatcttctccatcaagaccttttgctgatcctggatggccgacattctcgaattatgtgcctgcatacggacgacgagagggaagagggctaatcggagacaagccgtggtgagcatgatggtcccccaccaggggatccccatgccgacgtgaatggcctcgagagcgtcccggatccaacctgccgggttcaacatgccgtgggtcagacccatgagcttgagatcaccgatcttcatggcggcgtggacagcctcaggagaggcgagaacgtcggcaatgttgtcggggttggcagcgatgagggattcgatggtaggcacatcggcagtcgccgggggctgagggaggatcgagctgggatccgtgtccgtgtaaccgtctgccttgggcgcaggagggaacgaagacgaggcgctgataggagtgggcgaatgggggatttcagggttgacgggacctccggccatcgttccgtcggtcgccgccatggcggaggggtcagcctgggtcgtcacggttcgttcggcttgcccgttgacgtccggcacggcgagcgtcgcctggttgggagggatcgagccggttgccgtggcagaggatccggctgtgatcgattcgggagccgaccatgagattgatcgggtcgaattcataaagatggacgattggaagagcggggtgacgggtcgaagtttggcagcagcgttgttcgatcgcaatgtagggcgaatcgcctgtaaagaccgtcgatccgaaacggtttcaattcaggtcgtcgtgctattgaaaccattcaatctctcttgtctctcacctgaatcgagatttgtcgtgtctgacgagttccgatatggctcaacctcgacgggctgtacagaaataacgcaaagttcaagtcggcatactatggatattcgaggccggacttgaagacttacagcgaggccgcatttgacagcttgactcgcgacaacatcttgtctgtcttaacctctactgtgagccggagagtgtgaatgagctcggtcgtacaggctgcaatgctgtgattgagatgtaccccctcatctatgcaactattcgaggtctctttgacatttccaagttgcccgctctctcgcgtttcgatcgtcgtcgcccaaagatcacgtgacaagaatcgattgaaacccaccaactagagcttggaggtgtaaaagtagaggttatcaacacttagcattcattcgttgtgactcgacacataaatcttggtcgatgttacatgcagaattaatattgtgatgcggtacatgcgtgcgatccatctatttacatgcctcgaatcgattcctactgggatacaaaaagaaaagaaaagatggcgcggtcgtgagttcgtggcctactcctggagagcgccggaacgatatgaaaaatgcatctatacactacttgtttttcttgttcgagccttgctgtcgcatattgtgatccatccttgcctgtgcggaccccttgacggccagactatcggcatgctggatctcacggttgaactcgcgagggacccatagacccaatacgtcgatcccttcatacattcgtgagagtgcgatcgcttcgacttggattagtgagaggagcgtgatggtacgtgcgtccgggatcccaccctgtctcgcccgcgacaacaaacgcaacgtctcggtggcgtccgtgacaaagatgacccgcttgtacccatgctccgcctgcagcttctgaccgtacgcactgctcagcagggtcctggtcatgcgtatggcccacagataggtcgccaattcggcttcctctgaatcccgcatggtggttccgagcgaaacgctgtacgaagtcggcgtcggcgtcttcagaacgatcccaccgcccgcgtatttgggagctcctttgcgatgcttggtaccctggcccatctgggagtcgcggaaagatccatccgagtagatcatgagcttgggatccggatgagtgctagcgtgatggaacgttcggaacgcctgcttgcgcgactgctcggcgttgacggaaatctgacccttgacgcccgaccagtgatcaaagcgccaggtgatccgtctttgatcctcgagcaggttgacttgaccgatagccacgtcttgataggcgagttgctgtctcaaatcagctggtagcagagcgacgcctgatgtgcgatggaattcgtcccggtacgccaggagctcgacagactgttctgcagagtgacgggccaattcctcctccactagaaagaccgcagccatgtaattagtatcaagggcatgcgagaacatggccgtttcggactggactcacgagcatcgccgaagttcaggcgattccgctgaagctgggcgaacaaactctgaatgtccgctgcgagctcgaggctgtccacgtccggcgtcggttccggctgaatcgctgcttctgtaaacgcaaacattcagtcacgtagcccctagtcgggggagacaagttgactgacctggtagagatggttgtttcttgtcagttgtagggagtctcgcgggcttgcttgagtcacccagccagctgcggtatgcggcttgcaggaaacctgtccatgacgaatcagcacgtgaaaatcgatgcgaggagtatccaacagcgatctcactcttgaagccactcaagtctacaaccgccaggagaaaaaagcctgtcaatttcgctcaaaaggtatctccacgtcgacctcaacttacaaccagatccggcaggagcagctttcgcacccatctcgtccaccttgtcgtgtgcttgaaccggctgtttggaaggtgcaggtgacgatgaaacgggttccgacggcggcgatgtcaccttttcggtggctttgaggtcaggcgagttcagttctgctacggcagtctgctggactgcctgctcggataagactgattcggcctgagcttgcacgaggcttgctgcttcgaccgcttcgacaagtggcacctcctcggtcggtatcacgacggcggtctttctcgcggatgcaggcctgacctggcgcaggaatgttatggtcggctgttcgtgctcgataccatccgtcatgaccaggggattgccgattgggcgagggatagaatcttcgagagcgtttgcggaatcagtcttacccaacgcgttcaacgcttgcactgataggagcgtggcagggtgagcgatcggtggaggaggagggactacgactttggctttgaggactcacatcgggcagtcgcagcctgctgtgcctctctggcttccttgatccgtctttcgcgtttggcgacggcttcgtaacctcgaggcgtgctgacagtggacaaggacgagtcttcctcttcggcttgtcggaggccgggttgctgcatccgatgaatctcctcggcttgagctgcggattccaagacgacttcgaggtgttcaactgggagctctgtggatggtgctgatatcgacgcgtctccagaggcaacatcatcggccgtggtcagagtggcttcgtcagtcgattctttggctttttttttcaacctcctgactgcagcacgcgtcaccggccgaaccgcgcgaacggggcgggtcgagggtcgattccgagggaccacctttttgagctttttctgcgcagtctttgagagcggtggcggcgagctcgagatgtcgccttgtgtagcgtcttcctttggctcgaccacgtctgacggttcgacctgtttctgctggacgacctcggatgatgccgaggtcgacgagggctcgctcgcgaccgtgccctttatcggctcttgcgtcttgccttgtgctttccgcaacaccttggcattgtctttcaaccaatggtccacgccgggcctcaatccagccggcaacccagcgtcgactctctcgatggcgctcctcagatgacgttccacgatgaggggcggagcgttcgctttgaacgcactacaagcgcgtctgacagagatgatgatgcgattcgagacgtgcatcttgatgagcgtcatgatctgtgtggcgaggggaccgttcgggatctgaccggaattcgagatctctgtgaggacggttctcgtctggcgtggagatttgaatagacccttcaacgacgactctcgcttcggcgggagaggcggactcgtcgaggtcgcgccggttccggtctgctttgacgcagcttttgtggtgctcgtcgagccagtctctgagctgacctcttgttgctccggggcagactggggttggccgttcacagcgtcgtcaatgacgtccttgtcgacgtcgactttgacgtccccggcagtccgactatcaagcgcattgtccggactcgcgctcgaaaaaacgtcgatccacgagatcgccttggtctcgcccttgcccgaggggacaggtatcatcggatctccatccaacgcgaccttttgaacccgcaagtcggccacgggctttttggaaccgttcttcagttcgacagtgttcttttccgggacggccggggattcctgcttgtttggcgcggtcgtcgtaggggggacgatcggtgtggctcctgcgattccggtttccttgtctggaccgccgacggctttccccgatcgggaatcggcttttacctgcgctccgttaagtgtcgctttcgaccccgagccggatggtagcaccgtcgaaatctttttcgaagccgctttcgacgagctcggaggttcggcttgctggttcgtactcttcggcttggaggagggcggtgcgacctgtccgtgtttgatccgcgccttgtcatactttatggacgaggccccgttcttcacggcgtcctctatcatgctggcgatccagagtaaagacaccctcatcctctcttccgttttatgcccggcgggtaccctctggggctggacgaggaagacgctcaaccatcccaactgtgcgcaaatggtgatatcgcacttgatcctcttgtcgacgagtttgatggccgtggtcagccggtcgacgacttgacgccattcaggaggagttgacgaaaggtcggtcgaagcgatggcacggggaagcttgttcgtcaccccgagcagcttcttgcaagacttgcctagctcagagtcttctttcgagagggtcgcggctggaaatattggcaagaaggtgagtgagccttgtgaaggaacaggtggcggttgagaatacagggggttattcaagagctgaatgacgtactggagatttctttcggttctaccttgtcctccacctggtccgctcgaacgttcggagcgtccgcgaggtatctcctcggcgctatcagatgacacgtacgatccgggagtatcagctcactagagtcgactcgatgtaccaaagtcccgacctggtagaagtactgacctagacctagacggtagacctgaaacgaccggggttccagcccggagctcgattgacgagctcgccccgacggaatggccactcttccatttcgccagagcacagggaccgacatgtgggtgtgtggtcggtgtgaggactcggatcgtggtcccagattgtgaggtgcggcttgagatttgttacggggtgtatgtgaccaccattactactactgttatttcgatatgagatcgaggtttgggtcgggtcggctcgatcgcgagtagctgaagctgtcctggcggccctgagggctgcaatgcaacttttggactaataatggtgtcatccgcggatagcaattagacagtagacagtcgagtagagtgcgcgcccccggttttcccgtaatccaccgagaccaaccaaccatcgtacgtatctcgagatgtcatcgactacaattcaactcgatacacacacaccccatctgccccgccactaccgtcttcctcttctccatctagactcgatcatacctagtagaacaataatgttccgacccatcgctcaaaacgccgtccgaatcgccgctaggggaacccgttcggccgctaccctccagaccgagggggtcaagggtagggacttcaaggcccttcgagatggtgtcaaggagcactctcacggtgcgtagacgagaaaaaggccaggggcacgcgctggtcgtgattatggtggacgcaacaagtctgacgtgaacccgctctcgctgttcatctcatctctcgggaatgtgtgtacaggcaccaccgacctctggaggaagatcagcttttacgtctgcattcctggtgagcacgaacaagctcccgcgctcattcccgaccggaacgagcgaggatctgacattcaatcttgccatctcatcctaggtatcatcgtcgtgcgtccaggcccagtccggggcaggagcctagtaccgagcgtccactgagagaaacctcgtcttgtttgcgcgcgcgtatagggtgccatctgggtcaagcaggtcgaggacgagcacgccgctcacctcgagcacatgaagtcagtgtgccccatccgagtcgacggcgtggggggttgggtttgagttgggtttaccatcagctgacactttgccgctcgtcccttttttggttctgacccgctcatacccgcatgggaacctgcctcgaaaacccgactgtactctgtggatgtggtcatacccctctcccccccctccttttgcaatttcgacacgaaatcaggcacgacaacgacggcgagatgcccgagcgtaccgtctgtgagtagacgcgtaccacctcgttatcccatcccttacccttggagccgaagacctctttgctgatacgtacccctgccgacgctttaccctcatcctgaacctgttgatgcggaccaaaagacccttacatgaacatccgtaacaaggtgagtgggaccgctcgtccagagatgtgcttccccgttgaccagccgctgatcgtcgtgtttctgtctgctagcccttcccgtaagcatcgcgacgactcgtttcttcttgtgtgctccgtctgtgtcgctacgcgggggccggggattcgagaggtagatgttggatcggaatcgatactgatgtcatccatctgctatacggtcgtcttgctgggattacagttggggtgaacgtgagtttgctgtgttggtctcccccgcctttgctacgaaccagctctgaaccgtattcttcctcgctcttcacgatccacagaggccttgttcttcaacgtgagtcattgaccgcgcccgcccgaacggacccaacgacgtagctgaccctctacacgtcgatcctcgcagcccaaggtcaacatcccctcggaggccccttgattcggttgacctgtttaggcttgaaggtggagaagagtgtttgggatgtataccgaggatgcgaggagatgatgcaatcgagttggataatcaaggcgttcggctcgtcctaaccccagggacatatcgatcgtcctacgagcccttcggcgctttcagacgcgagatgaatacgagattacaacgggtgctcatcgatcgcaccgattctgaatggtcgacccaagtgggccgtgcaatctcgtagtcgggtctcttgatggacaatcgtgccggggcggtagcctccgtgcaaagtactcgtaaagatcgacatttgttggtcgatttcccaggaataagggtcgagctcgacctttgattactgccgaatgagcacctcacgaacgatcgccaggccttggtgaagactactgtcgatctgccccgtctggttcgcgggaacgccagggctcgactttcagatcttctcgctcaaagcggtatttggaggagtcgggcgcgcgtatcggcagttctcagcaaacaggtacgccgcttcacttgttacacggtgtagtgcggtatcgagggactaagggacgagtcgccgtcgccgtcgatctcgaattggaatgccaacgcaggccatggtgctcctcgagtccgttccattcctgaactcgccaccataaaacaaccggctgccgttccttccgacgtacaggctgtcgatcaagcgcgtcacagtcgtggtgaatctccagcgctcgattcttctcgacttgtgggcgggtttctcacccgcatgcaaggttccgattggcctttgatccgaaagatattggccatcgcagaggaatccgacggattcagatcaacgataaagggggtttggttggagcagattagatacggcgtggctgggttaggcgcgtcgacccagatgaagactctcctccaagtagaatcgggtttcgcgcctcttcgcattcatagccccatccattaacacgcaaatgctgatgttgggttaccatacgagataagctcgactgctgcttgcagacttgcggagcttgcttctagagccttttccttagagcattaccagatcttgctgttgggctcgacgcatccggttgacaataccggcgtctagctgctcatgttcatactggatgcactactttcaggcaagaagagacatttccctcaatgtatcgcacgcctggaatctgccatcgcttgttacctaatctgatcttggaccgggattgtgagcgaaacgtatcctgggagaaattccccacataagggatttcatcaaaccccaaactacgcatcaagtcgctcccctactagatcactgtaattgcacggctgaagtagcccttcggctcgggaccgaaattcattcaagctttgcacagacgcctaggaggacaccagcagcacttttgggacttttggcgaaaatcgattattgacacatttcgacatcgaatgacccaatgttacatcgtcgacgagctcaaaatgaaaaccaaagccttccctggtccgcccgcagtctcgtacaccgataacgagcgaaagatggggtccaagagggatcgggatgccgcgcgcgtccgggcgagctttttatgcgtactgttcaggtaacagaaacgatggtgagcgacgggagctggataacaaggggaaaggggttgtactcgcagtatcgatgagggactcgcgcatgccgtcgatgacggccgattgggtctgtccttgcagctctgcgatttcgcaaagacagtcacatgttagttaatgcgtttatgcgaccggaagagatcacgaatcgcgatcccgtatgatggtctagacgggatacgcactgaaggtagcctcgatgaccgagatctcggtggcagtggtatccagcccggcgaaagcgcaccaatcgttgacgacgagtccggctccgatcacatcggatcctcggttcaccgtaccggcctgagattatgcggaatacagtaggaatggggtcagctcatggctcgcctcgacgttgccgatagttgatcgggaggcgggtatgagggcgacaggacgaagatcggaaggaagactaaacattggggtagcaaagtgcggaactcacaacaaggggaacctggagcaacgacgagagttcgtcctgttccgatcgcgaagtcttggggtgtacgagacctccctgtgaatcgacaagaaagcggacatacatagcatgtcagccggccatccttcccgtctgcgtcatcgaaccgctagcgatcgggcgacgcacctggttgctcaaagcgcaataactcccgaccaagacgttgctcgccaccgtctgtctaaacacctcgaccttgaggacatcggcgatgatctcctcggtctccctgtccaaatccgggtggacgagcgcgacgtaatcgttgcacacgatgacgttgcccaaggcgctcaacctctcctcgacacgctggagggcgacttcggcagggagggagtttcggagatgttgcagttcctggtcggtcgtcgtgctgggtacgaggagaccgtgacggttcccggcggtcagtcgaccgacgatacgggtaccggcgatggtggtgtggatgacggggatgacgtcctggagctcggcctcgaagaccgagtagaagttggaggatgatgccagggcggtcaaacagtatctatgggtcgaggtttgattgatgaggggcatcgaaacgtcagcggcggtcgaggcaattcgtcagcgatacgagatcgacgtacgagttggtgagcttggaaaagactccaatgtcggaagagttttcgaattgagcacggacagccatgatgagatagtgttgttgagtgtgtctttgggctatgggtatttctaaaaagtcgaggagtattcctgtcgacagcaaggagtattggggttgagatgaaatcgagaaacgaatttgaagggaagatgatcagctttgtgtgtggatgctcgcgtttcgctcttatattccgtccgagcggccagcggacgtacgatcgagtctctcggatccgatatcttgtgaaaaggagttttggtgtgacgtgcaagtatgtcttacggcggtgtccgagttttatcgagatggcatccttcaacgacgtcctctacctacggcggcggtgacttgggggagcagcagcagcaacttttgatgacattcggatccggaaagaatgccgtcatcagcgtcaagtcgctcgggggaagaagtacacgtcattagcttgtagatatctgtccgttatcaaataaataacctccctctacctgtctttgtgacgcgtgagatgagaatggctcgagtagaagttgaatcaaccaacatcccaacatcccagcgatacaaaacaaacaacctgcaacctgacccgacgcaagagcagcatcatcgttcgattccatcttgctcgattcaaactcgatatcatcttgacaattcaatattgaaaaagggccttactttacactcacatcaaccctatcatcatacacttgcgatactccttgcctaccatgcctctcaaccctttcctcgaaaacaagaacacctcgacccccatgaacgacaaggtttcgaggacgccctcgcccatcatctctcccatgcatgacccgaggcagaagaaggccgtcgtacaacctcctaacaaggtattgggtgccgtcaaccgtgagttattatcgctgtaatgattacaaaggaggtctcgaatcgggtcgctgacgaaccgaacccgatcggtttccagccaaccccgtcatccccggccagaacaccactccgtctggcgagcaggtttaccagcaaggactcggacagaaagctctcctcgccaagcggttcgccaaagccaagtaagtcatctgcgatttggcccgccttcgttcctcgtgatcaacgaatcctgactcgccccaacgcgtccctttgctacgtttagcaaaccttctctcgtctcccctacagaccagatgcagtcaccttgttcgcaaaaactcgccggtgccaagaagaggcactttgtcaagtcagtccgatagattcaccagaaccgttgcgtaacccactaacccgagcatctccacctgttttcttaacgagcaggggcaagcccgtctcgctagcatcgtcgttcttggccgctcagtcgtcaccagcgggcaagtcggtccgatcggaacaagaccaggatgagaatgtcgacatggcatgatcggaacgcgtccaacattgaggctccgagcacaacctttcgttttgactcgagctcctcgatgccgcatcctcgctcctttcatacatctcgcattcttattctcagctcacattgtatccatcccgggcttcccttcgatctccttcgaatttttacccctttacgcacgatccagcagcaataatctttgtcaacccgtcattctaggcattcctttgtaataacatgtatatcctcttgtgagcataccgatcgcttctctattcaggacgatgcccgagtcagtccgtgcccatcgtctcctctgcgcaaagaaggtagcgacatcgagggcgtcaaaacgcttgctgattgaggtacagtagtatgtcatccgatacggctggtcaaacgtgtcgcttgagtatgccaaggatcatgctgcatatcgcggaccattgttttccagatcgtcattctaaacaaactgttcttccggttggtcctgactacgtttctcggctcggcagtcgcacggcgtcacttgtggtcattgcaagacgcatggggagttgtacgactctgcgaataggtctcttgcttgcggatccgtggtgccgagacgagtcgccataccagctcggttaatccgtcaatgctttctccccgagcgtgtagtcgcatgctagtgggtgtgatacaactcggcctcgtcttgaggccgccatggcagattcattccatttgcacctcgtaataagcaacgcaatccatctcatcccttcttgaccttttcgtttaattgatccgctcctacccctaatgccttggtacgtcgggcgatgatcttgtccatggctttttcgagcaagttggccgcttttgtatattgattgtccttttcgctcgtcccgttgtattgtcgacagttggcaaagatcagcttggcatctcgcgtgaattcttctaggtcctggtagtgattgttttctagcttgtattccatcgtttgcaggtctgcgaggaatgacaccatgtcgagtcagtgataaaatagagctgcagctcgaatgacccaagactgctcgctagcattgccaatcggatgcttacccatcggttctttgatcgtcgaatagtagtccttgatcaaatcgccattgacggggttcaagaatggccaggcggcagtctcgctctgcatgtcatccaggatctgccgaagcaggacatgataccgattgcggacgggttgtcggatgctgtattagaaatcggagtcagctcactgtgacacaccagttggcagcccgcactacttacatctcatccatttccggatcccatccactttccgctatgaagtgacaacatttacgacgggtattagtcacagacttggcggatgggctcgggaaatcgcttacccagacccggtatttgatctttggacaatttgacgatttgaccgggttcacgattcttgaatattgttagacctgcccgaacaacatgtgaccgtgatatagtccggattttggcaaggacagcctatttgaaaaggttcagttcaacggcgcattgcgatgctagtcacaaggcaatttaccgctttttgccgatgcaggacttggtgcgattcgaggtaattgatcttgggaatcatcttacactatcgagagaatcgaatttgacaggttcagtctctgctcaagtcaacgtaaagcctgcttcgagtcggcgcacctgcatcaaattcgctgaatcatagtctttgatgtagccgacccatctctcccgcggaaaggtgatctccttgctgaaaccttgcttcttaaagtagccgatcgcgtaattgtcggcatacgttagaaagtggttgatcgtgggatgcgctttccgtatataatccttcacggcgttcatcataaaagacccgtatccctttcaagttaaacacagcatgtcagtactacggatgattggcaattgcccgcgatcatcgtacccggatttgttccgtcgagtcgaccgcacaaaatacgatttcggcgaatcctctactctcaaatggtcgatagcagatgcctcctacaactcgccatccccgtttgacaatagccatcgagtaatgattattgtcaagcacgagcctggtgatgtattcccgaggcattttgggaagctgcttctggaagaggttcttgagtccaatgaggacgatcgaggagactggagacggagccaccgaggataccactggcaggcgtataacgtcttgttcaaactcctctgctgcagatttggctggtaacggatcctgcagggcttgttagtagactgcaagctgtcggtcgcacgttccttcaccatgactcacaacatcgagatcgccccagtcttcgatctcttcaacgtctatatcatcggctagtcccgttgtccgcatttcctgatcgacatcaaccgtgaccccttgggtcagacggttgacaacttctgccgcttcctcgacttgctttgcggacatctcttgaatctcagctgacgtctgctggtccgctgcaccttttttcaaagcctcgtcctcggcatgccctacactgagtcccgctttgtgtattgggttgccctcatcatcaaccaccacatcttccccctccttccgcacgacggatacaggttctcgctgcatgccttttcccttgccagcgcctttgcccgctccttttcctgccagacttcgtccaccttgccctactcctggtactaatctcgatccggcggtaccagccttgccgttgacgccattcgtcttcgaccttttggccaacggctcatcatcttctgatgaactagactgaggatcctcgtcatcgtccggtttggagccaagctctttcgtcttttgtgtctcatcgtcggatcctgatgcgacagattggtctccggattctgatcctgtacgccgccgtttccgctgcggcttgggggaaatccgcattgacgcttgtaaaggtgtaccgggactagaagcaggcgagtcctcccgcgccgtcgatttaccggggcgttttgagcctacggcagtgaaattcttcaattgtctgcggtactaagcgtcagaccggtaacccgatgccaaaagctgaagaagacactcacggtcgtaacccgtctatgtcggggtcggtgtactcgaaatcgagcagcttgtgcttatcctgagacatggcatccgggaatcaatctccacccaccctcattgtaggtattgtaccgatgcttacattatataactcctctatccgtccggccactctccgccgccgtcgctgttcatcttcgccgacgtcttcgctcaatgtatgtccgccatccggctcatcgtctagccgccagccgtgtccacattgcccgcaaatgtcccacagaattggcttgaggtcgatctccttttctttgcctttgctctttgtgacttctaaacgtatctgggctccttcaggtggcctgagccccgtgcagacacagtcgtccgtacggcaggggatgaaccgcgctagcttgaagtcctgaacgtcttcgctcaataacgcgacatcctcaacggcccgagggtagatgtacccggtaggaactgaactgctagactctcctttactgcgaggactcggcgtcctcagtgatgaatctgtccgtcgaccagacctcgaattcggatcattcgtgaggtccacgctcaacgtcgaagaccgacgtctgcgatttctattggaccagtctgcaggagtaccaggtggaggtggggtgagagatccaggagaagacgctaccgatggtgtcgaagggccgtccatcgcccgtgtgtccttgaccgttcttgcaggcccgggcacgtcgtaacagacgagctagatgtccaggtcggggtctacttgtacgctgatcgacgacggcgatgccgtagcgaaatccttagattccggtaccgttcggcagctaggctcaatgactagtacgggggacgttttgtaagatcgaagcaagcagtgggcatggctcagtcgagatcaaagtggcagcccatcttgggcccctcacccagcccagcagggtgttttcccattcgagaccacgctcgaccgagtcgtcacttttgcttccgcacaacttcccacttcgaattcgatcatcaacttgcacctcgatcggttgcgatcaaaagttcatcgctcgatacaacgcaactcgacaagtggcaagtggacgataccaagacgttcaggacatctatttgaaccaccatgacgaccttcgtacttcccggtgatgctatccctctaccggccgagccggtcgatccttcgacctctcaatcgataacttttggccctggtatcggtgcttcggcttcaacttccgtagctaccaaaatgggaccggtacatagcactacgaagcggcggaaaaccaaggaaggacccaccgaggcaaacagactttgggtcgaagtgcagtccaagcgagtgagtatttagtcacatcgaatcacgcctgcagtcccggctaatttgtggataccttgatgccccccttcgacagtatgtgccggcgccaggtgaagacgtaatagggatcatcgtgcaaaagcatacagaaggcttccgggtcgacatcggttccgcacagcttgcccaactaggacaattcgctttcgagggagcgagcaagaagacgaaaccgaggttagatgtgagcagaaacccacaagcttagatccctctcgataagctggcactcatccgctggttcgcctgtcgcatcatcactccagaacggagttgttgtacacgcacgagtctcgctggcaaaccgagatatggagccagagatcgaatgtgtagaccccaaggacggcaaatcgaacggatacggagagttgaagggaggcttgatgatgtcgtgctcattacaactctgtagaaagtaggtcgtatccactagctctcgcagaatcctggacgcagactgaccggaattgactacagggttctgtcgacgaggatgatgggcgagattatgacactctggccactaaatacccagatcaccgtagctcctgcgatgaatggacggatatggctgaactgcgagtctggcatccttccggtcgtagggttgaagcggatcttggaggcgatcgatgctggcgaagtggattgggaagatatggacgtcctgcagagatgggtcaagaagcagggcatcgtcctgaattagagaagcgttcgtacaactgtagcaacatatccttctcggattttattccccttgcgactatactcgaagattttgaaggcgtcgcatggcagaccaatcgatgcggccgcctacctcatttcaacgatgatcgttgtggggtaggacactggagcatgtttgggtggtgaatcgactcgcgatgcaatggggacacatgtcccgattgctaataagcgacacaaccatcttgtaccttttttgctgcgcagctgccgggattccgacgaacaattactgcgatcctatccttggggcgtcacgattcacagcgtacttttccggctgcaaatgtatgtccactgctggaagcgcgatgaccgtattgccacacaaacatattcggggcattgggccaaccatgtatcatcccttacctagctcatgtgagttctcgcccgcgccagctttgcgcgtaatctcatcacagacctggtggaagagtgaaatcacatcactcacagaataaaccacatattatagacgaggttgtcccgggaggtatagccgagagcgtgcccggacttttttgtatttttgcttccgaaacgcgaagcagcttcgacctctgtctgttaaataaagagcgggtgtagcgttatcgcgtttgggtaattggaagccaaagggccaaagggtttatacgactgggaaagttttgatcgaatagtatccaaagagccaaatcggtcagcttgagcacacgagagaaatccaggcaggaacatcatccgaaatgagcgaggatgctgcaccggttgttgtggggaacgcctcgggggctttgaaggacatcacgttcggttcagtaagtctcgtctattcaagagtccataatacagctcacactcaggatttgatgcactttgtgcactcagatagcgggcatgacttcaaagttgttcgagcatccattcgatctaggtgagcacgtacggccgcgatgaccgcatgtacattccgtctgacccgaaaaaaatggcccctctgccttatcttagtcaaggtccggctgcaatctcagcctacagaccgtcctcccgccttccagggccccttggattgtttcaagcagacctttgcgaaagaaggtgctcgaggtctgtatcgagtaagtccccggcgtctcggtaagattccaagtcatttctcttcagctcgctgatcacgtcgagatctcgtgctacagggcgtatcagctccgattgtcggggcagcagccgagaatgcctgcctgttcttgatctacaacaaaattcaggaagtgatccgaacagcatctcgtcctggccatacaatcttcggcagtcccatcgcggctctggaaggacctgaattcctgagtgagaaggctcgtgggaagaggagagaaatgagcatgggagagttggccatggctgccgggatggcgggggcgtttgcgagctttgttttgtgagtatcttgttgacatgaaatgatagtcccgcgagctgacgctggaaaacctgcacggctaggacacctatcgaactcgtcaagtgcaccatgcaagtgcaggccctggctcgcgagggagctttcggatcagcatcatcgacaccacttcatgcggctgccaagggccaacctgctactcttgcatcgacatcaacgatccactcttcagccgccaagactccgctcgccaacagcttcaaatcccccgtgaccactcgcgctcgaccgcccttggaaggtccgggcacgatcatccgatccgtcatcgccgagcatggaattcgaggactctggcttggacaggtcgggacccttttccgagagaccggaggttccgccgcctggttctcggcgtacgaggtcgtttcccgtgctttcctctcttaccacaccaagaatgggcggaccgccacggacccgctgactggagagcgagtacctctcagcaagaaggatttaagcacctgggaactcgtcttggctggagccagcgcggggatgagctacaatattgtcctctttcccgccgactgcgtcaagtcgtccatgcagacacaggcggaattgagcaaacacgaccccaaccaaaaggggactcggccgacacctaaattcttccaggtggccaaaaatatttacaagtctcgaggcattcgtggactttacgctgggtgcggagtcacggtcatgaggagcgcgccgagtagcgcgatgatctttttgatctacgagacgctagagagcaaatttgggcattatttctagtggtcgagcacgcattgtcggaagttgtatcaggttctgcatatggatggtatcttgcctcctcaagcgtactgcttctaaatcccactgactccggctctgccagatactcatcagtggcgttcagaagccaggcgattacccgattggcttgcaccccctggacgaagagttttacgatcagggcggcggtttcaagctgtggatcttgggtatggccgcaaacggctacggtcgcaggaagccatcgtcaaggaaatttagcagactcggatagagaatcgtggtggtagtacgttctgctgtccgatgttgttacacctcgggctaaaaagcaaaagcctcttccgctgtgtcggagttcaaagacactccctatgctcctactttcaacagaatgaacaatgcttctcaggccgactttgctctgcatcgatgctgccgtcttgaagcatgtagtctcccgccactttatacctttccgaatcggtctttgacacatactccgttccacaagcatgtacaccttcgactttgccaaggctgccgacgacttaggggtggatgccgaccagcagaaatcaatcaacagccgaggtacgcacgactgatgctctccgtcttgttggaccaatctctattggtccttgcgcagattgcacagactagggagagaaagtaagatgcaagaagaagatttgatcgcaacgttcgactgccgctcagctaaggatgacctcgttgtcatctggtgaatacatgcgccgtcggtgaaacgagcggtgatcgtggggcttcttttagttgcctaatacaacaccaatctcatccacctccatggacccgtcgtcctttttggtacgaccgtcgttgaagacctcggtacctgcatgagcgcaaaggctatatcagtattgtcgatctctgccccgtgcgggtggaggtcagactcaccagctgcgagcgactcaatgaggagctccaacttggatcctgtcagaccaggctcgtcctggaaatcacataccagtcagaagtcagctccgactatacattcgccgacgttaatcacgacttggcgggcgagtctatgagctcaccttgcgcagctgctccaaatcgttcccaaacgccgtgacgactttgcccatccacaactttctgaacctcgcttgtctctcctccaaagccttcttctcaagctcctcttctgcctgtacatctttaccgttcgaaccacccgcggcctcgtcatcggaatcgactccgatagcattctcgtcgttgtctggttctacgtcgtccaccgccatagtgacgggtgtggccttttccttgcccttgccattggtggtcttggaagcaggcgaagaggtggtttttgtggaggcagtgatagggagaggagcgaaagccgggatatcgcgcacggtaggcgagagggagcgggaggcttgtcggcgtcttggtcgagcgggttcggcaacggcaacggcagcggcaggggtgatgattttcgatggaccaggtacgtcgctgtcagagtcagaatctgatgatgatgacgaggaggatgaagaagatgaagaggaggacgatgaggacgatgctgcgacgggtcatttacggtatttgatatttagctatcaagccgacaatccacatagtagcctttcgaactcacacgatgcagccttcttgactggaatcactttagagactgactgtacgggcttgatgggctcgtcatcgctcgaactatcgctactcgagctggacgaatccccggccttgttgttctttctccgtctctttctaggttttctcttgcgggtgttggttttcgctacggcgggtgccgaggtcgacgccgctggcggaaccgtggaggacattcttagctgtaagaacgatgcgatcaagcgtgagggtttgaccttggtctagaatgtcaagagtatgtgctggattgaaatgactcgggctcgacctgtatacctgccgttcttgaccgaggtgggtgctcaaaatcataattatcgcccaaacgcaaccctcgcgctactaagggaattaagatattttgattccgacagctgaagaacacgtcatacatgattcattgttcgaagcgctgcaacgctcgttatcaaataaatgactttgcaagaaactaggggatcaggggttgatcgtcatttggctagactgggatgtgattagatcgaccatcagctgttcctcggatcggtatctagccgtcccaagtattcacatagtcctaaacccactttcaatacatactgtcgactccctcgcgtcgaaagctcaaaccggaatatcttaagcttgaattcattatcgtacgtcgctccgccagggtacattttagtgagccagtgcctcctaaccgactgcgccttcgctcttgcagacgatggttgctgtcgaagaagtcagggatgcatccctcccccaagagcacgagtccgattacgagaccgactcggccggctctgacgccatctccgtttcggacgtcgaggatgacgacgacattgccaacgagacttacaaggacaggttgatcgctctcaaggacattgtttccccctcaacgaggctcgaggccgtgaggaagtggcaacaggccacctcgtgggtctcgacgggtgggatgtgggccggaaacgccgtttggatcatcaccacgagcgcgctcttggtcggtctacctttggctttggccatcgaggacgaggccaggatcgtcggtcaggagaaggaattgcagatgcagcaaagcgggcaacaatcggtaagtcgaagtcgggtaacaaagggcatcgtgattactgtatctgagcgtcgagctgacccgaccgcgtgaatgttgttctttcccgtcgaaacagctcctgggcgctcctcaagcaggccagcccaacggagttgtccctcccggattctaagcttgcgagatgcagaagagagagagaaagctatttgcgagcgagacttgaagattgatcagcagaggagcagccacagcgacgagaattagagttacgagtcactcaaatccccccaatccttgtatttttatcccccgagaaccggtctccccgccactcggcctgtgcagcataaagatgtcgacgaaaaaggacaacgcgagcgaaggaatcggatacggaattggcagaggtattatagtgatcatatgcacagaaagcttttacaaaattcataccgaagccagactcagcctgaccggaacaacaagggtctttgacaacgatacctgcaagctgaactaaaacccaaggtgtaaagtgcactatgccaaaccagccgcctcgtcgaaagccccactccatccgcgcttcctgaacccattgaaccacatcaaaagcttgaccatgctcgctcgagtatccagagtccattcatacagtcgcagaccgctgagagcggcggcgtcgagtaaatggtcagatacgaacatagcgaagctttgttacggacgacgcaggagcctcctactcacttgtagtatttttggtattgccaccagtcctcgaaccagttcgtgatcaggtcggtcgacagaccttcgacgcgcaaccgttgaccgagcttcttgcgatcgtcttcccacgaagcaaaagcgcagaaacgagctacgatgatgaagattctcgactgcaacaagggctcaaaagctcagtcacaagggcgaggcgagatcggctgagacatcggcggcgcttacaggaccgtgtgttgtgttcaaggagacatccagtgcacgttgcaggtcgttcaatttgaggatcatgatcaatcgactgtcaagttggagtacgtgcgctggtcagctacctcggtaacgactcgacgaacgcagacggcacccaccgaggagcgtttcgcagcaaagtgaaaatcgaggtaatcaatccctcttgttcagtcatggccgttctgatcatgttgagctcctcgtcgttcactaggattggacatgacgagcatgagccatgcgcaccatctgacaatgcccgcaagagacttactggattgtagctctagcaggctcttcttgcgctttgaagatccgcctgttgctgtaccgtctgcttgagacgcgtctgcgagccccatccttccggtgatagcggtctccaatacgggatactacagcaacaatgttgacaatcagctgcgcgttctccatcgacagctcaagcaatggcataatcataccagatcatcgccaacgtttgcgacgagcttggcatagtgcttccgctttttcaagtttttaggggtttcgggtgaaatcaggctgagccagaatctagcgtaattcactcgtaaatcgtcgtccaggtcaaagtattgaccgtggtcgaggagaacaatgtcaaagttgaatggagatttggatttcggcgctttagggcggatcaacaggttgccctgcgaattatcgtcggcattagtaaactggctggaatcctcgcaaacacgatcctgtagcgactcacatgatgagggtccgcatggaagaacccgttgatgtagaccatttgcgaaaagattcttgacaactgttgcgatacttgatttcgatcgatcttgtgatctctcaagtactttaggtcgtcgatccgggcgccttcgatgactgttcagattcatcacatttgccggttagcagtgttgcaacatgagtgaccgggaactgtttgagcagcggagaccgacattccatgaccatgcatcgcttctcggcccatgacacttctggaacgtagattgcagtcttgcctatcagaggcgcaaagtccgatttggccttgtccgagttccaagcttcgtgggcaaagtcctgattcggtcgtaggacgcacgtaatcaacaaactatcgtgaagtctggccgagagacgtcggatctcaccatttccagaggcaacattctgttcagaaacgaacactggtgagcttgggccatcgaacacgctctaagctcaactctgaaagactcactcagtcatctccttgcctagccaagaaaactcgctgaaagcccggaatggacggtcaacctcctgtcctgtcaacttaggtctcggtgccccgccattcgcagctcacaaatcgggaaagacagccttgaccagcttcatggaccatttcactgttgcgatactatttaagagaacactcgatcaacatttccgtgcgcatcggacgatacccggtcggtagtggctcactcgatggcaacgaaatcttccaaatgcggatgttgcaacttgacagcgacatccttgcccgtcctcctgtctctggctcggtgaacttgggcgagctagagatcatcggccccgtcagcgctggaagtagtagcagaatagaccgtacacccggtgtgaaacaggactaaccgaagctactccgatcggcttcgggtcgaaattgtcaaacagatcgtccaatctgatcatcgcccccaatggtcagcctcattgaaccgctagcctcgaacgctccgaagttgaagtgatgaccgacgtaccccatgtccatatccttcttcaacatggcgtctagtttgggaatggatgtagggtaacactgatcctgtagtggcctcatgctagttgtccatctgcagatgcatgtgaccgccggaggccaaaaagaaaatcagagttgaacgatcaccagcaagcgagcgattctcaatgacgcactcaatcggtaaagcctgaatcgaagcgatatgttggcccagtttgacgtagattccggcgttgctcttgagggcttggaacaacctttcgctgctcctggcgtgacaagcgtgccggtccgtcctggccaattgcttcctctcctgctgagaatacttgtcggccggataccaatcaaggaacgtatacttgtagtcgaggacgctgaggccgacggctttgaccagtcggaggcatcggatcgaagcgatgaggaggtgacgggcgggagggatcgtctcgtagcagatcccagttatagcgaggaacgctgcgaggtagtagaggaatcggaggcgacttcgcctacgcggggtacggggaggtttgaacgattccgaagacgaagaggaagcacgtccagttggcgggatcgaggcaggcccggtcccagtagaagcttgtcgtgtgacaccgaaacggggtgcgatctttgagggtgccggccagcttggcagggagagaggtcttgcgcatgtccagctagcatatgtcctgcttcctgcaaccgaggagatgtctagaagacgctgtgtgcgccactgcgatgatcggacttgatcccggcaggccgagctggttcgcgattcccatgtcagcggtatcgatttcgtcctgtatggcgaggtcgcgggcctgatcaggcctgcgcctctggtggcacctctcgccagactacaagagtacatggctcttgatgcttagtatcggcaatgctgggtaagtccaaggcgatggaaatcggcggcaagcgagtggaacagatggtaccaaatgatatgtttcgaggtttcgtccgacatgcatgcatgcgtgacgtcgatcgagtggggaatatcaaaatcacgtgatctcgtgattcaacccgtggcggcgcagctcaagcgctataagcctttggctctcaccctgcatcctgttacaagaaactccctcgaggtcggctatttggtcagcgtcttcaacattcaacaatcaagatatgcggacctggatgtggtaaatatggtcccaaggcagggatcacggtgcatcctggctattccgctgttgtcctgctcagcctagagttttgtcgcctgcctgaatgcgctcccgatccaaaacaccaatcggttgaaaccgtcttaattgttcgccgtcggtgaataggtatgcctcacacaatcgtgcgcctgattgttcccagcttaccagttgatacagtcgccgtgtaacgtctttacctacagtcgacctccgcgtcgctctttcgcggcagttctgcttcaatgcgagtgacatgtaactggcatgtccgtttgtttcgagtgcgtcttaggacctaactttgtttccaacaccgctcattccctatggtcctcgaaaagactcgtcgcttccttctcacgtagcatttcaatcggcaagtccattcgtccctaccgctgactgtggaaagtcgctgagctcgacatgcagtcaatgccttgatgtacccctctctggtacattcactcgtgcttggcctgtcagcatcacatccactccagttgctcgcgtgtacagtgcggtcatgacttaccattttcgagacgtttgatggtggtgtaaactgcacaccttactgcgaagcatggtcagctctagtgacggtaccgtccgatacgacgcgatatgctcgaaaggcactgccagctacgatatcaattaaaagcatgagccatctgctcgggtggataagacggttaagcggttgactggtgaacagctactcccacggtatacagcagaccatcgtctgcgatcaagcagtcccggagttttgtagcgcgcccgaggccatgcatctgtaataggagacaatttaatccttccctgtcctagactaatgtatcgctctgatcagtgaccggaggaataggtgaactagagaatcaactgcagtaggtgcgtggggcttaaaaaagaaaccccttcaccgatggaatctctcaacgtgcagtttgccggaacgttccgggtccatcacttttgaaatcgaagctcgcgaacgaccgctcttgcggacccaatcattctcgtcctccagcttaggtcccgagtagccaagcatggtaagatcaggccacaaaacggtgtgtccgacagcgatgggtcatcacttggagaacgtcgagtcgacagcaatacccagcgcctgtggtgccgaggtgggagcggcgcagccgagaagagtgaagaggcgcacggggaggatcgatcattggcattttcgacgcgatacctgatatcatattgtgctgcacaccgccgacaagcaaccggaacgcaaacgtctgtacacgcacctcgaactttcacattgacgagacacagcaagacgatcacacagacgggagagattgctgcacgaacacccaagatatcggggcaaccaagacgtacctatctctgaagacgaccgcaaaacaccttcacgaccaccctggaccatgccgatgacatcccacgctctcccgctcgaaaaacgacctccactcatcggttctcatatccgcagatatccttcgaacacgcaatgaaagtgaaggatcggtacggcgaaagacgaggcccccctttcctctcatccgtctcacgaccatcgcccccttgcctcgagtcttgcgaagagggaagaggcaaggagcgattggtctcgagacttccaagaggaggagaagcttcactctccgaatgaccgagtcttccctttccaaagaaaccgcctgacaacccggttcgtccggggtcgaggatgggtggatttgcgacgtgaaacaagcttgtatcgggagggaggataatcgacatgtcataataaggcggggggaaagggtagacgtgccaatcggggttgagagggccaatggaacccccggggtacaaaagcgtaaagggcgtagcgaggggaaaaggtggagatctctcttgctcgacgctcgccagtcagactgctgtgatcccggtgcctccacgagccggttgtcgtcgtgatagttgtttactgtatggcgcacatcaaaagcagagcattcgttcagccacgccgaacgacccgacatggcacgaatgtgatcctcattccgactcacacgaccgacgattccgtcgaacctctgcttgaaccacgagacgctgtcctccttcttgaccttgtgctgggcaccgatacgtccgtgcttgtacttccttcgggcaactcgcataccgggtcggcccatgacgacgtagaagtccataccgaagataccgataccggggtcgtacttgatacccaagtcgatgtgctgcagatgtcaagcgcaacgtcagatatccgtcaaaaggccgtcgctggacgacgccgggactgacctcgtcgataccgaatccaaagtttccagtctcgctgaagtttcgcttcttcaactcgtactccttgaccttcaaagcacgctccaaaacctcctcggccttgggtcctcggatggtgacgtgacaggcgatcttttcgttacgacgaatggagaaggatcggacggtgtatcgggccttggaggtgacgggcgattgaccggtaagctgctccaacaccttggaggctcgggtaagcctgtctccagactctccgacggcgatgtctgagcgcataaagatggtcagggtgagtcaagtgcgttctcaaattggcaagtgacgggcttagtattacgcactgatgaccaacttctcgatgtggaggtccttcatggggttggtgggggcggtcttctcagcctggaaagacatgattgaacaaggtcagactccgcgtatggtttaagcgattcctctaagggcctaatttcttcgcgggaaccctggatgtgaacgaatgacttcgagctcgacttggaggagctagacttgatgctctgttccggctctgtgctgccttagcctcacaggctccggcttctatcgacctttgctcgacatcctctctctccaagagcgaccgcaaggaacccagcgcatcgccaaccatcttgtcgtctagctcgtttcgtccgcatccagggttcccgataacttcgtcctgctccgtccagacactcaccattttgtcggatctttcttgcctcgtctggtttcgttctatgttgaggtcggaagcgtcgagagaaaagagagacaaagcacgatcaggacttttgttccaggtgcaaggataacggctaggtaaggtcaaacaacgcacagagagagatgatggcggtgcaaagggagaacaggcgggcggtggaccggggggtaggacctgtaaagttcagacttgacaatgtcgacttggacggcgagaatccctggtcaggcgggccaccaggaagcagccagggcgaggtcggggcggaggagccatggtgactctggctctggctctggcattgagacgaggcaaggagaaccctgtggtcagccaggtcgtaccgcgagtccaaggtcaggacctctctcgatcggatgcagcagcattagccatgccgagacgcgccgggttggtggcagccaaggcaaaccgtctttcgtcgtcgcctttgcagcgcgcgtcgatgttagaagcgcgcgtttgtctcctagcttcgagccaaatcgtcaagcgcaccccggccccttccttcagtcacgcaggaaattatctccgacctcgccgcgtaaacggccgtttcacttggtacagagaggcctccaaatcgccagtatttcgttccctctcctgcgggacaattcgactattaacaaggtactgctacggcagcggcacgacatggccaatcatcgacaactcagatgtcgtcttgagccatctaatgcattgtttctccccctacagttcaactaactgacagtctagcgcaagatcctgctttttcgaagctcaggatcaagatgaatgcatttcgataacaaacagcattccccagtcgaacatgatctccctcctctctactcgaatcccaatctgctgatcccgactcgcgaaaacccgtccacatccaacctctatcaaatctctgtacattccttcttgttgttatcatcacccctgatgtgacagatgactgctcgtgtcgagattgactcgctaggcgagacacccatcgtaccttcacaacgctaccggtcccctgcccatttttctcttctaggacgacccgacccgtcctttcgatcgtggctcatgcccgcccgcacaaaggtatgctcggtggctcggtacgaagactatccctcgtccttcgtactcgatacagaacaaacgcgctgtacacggacgacgggcgaagcccttatgccttgctcgacgcgtttcgggttcacgtttccaggtttcaccattggtctgccgatcatcagttgaccgaggccgggaactcgagaaccttgtcctgcgtctggacgcgacatttaccgacaacggaagcgtgatcgagtggtttcattcccgagcatatgttaagactgttcagattatccagggcacaggtccattgggcgcgttaattctcggtgcagcataatttctcagcttgcgccttcattcaacaacattggtacaaaagccaaacgactgggatctactcaagagcgggtcagacacgcttgctgccggctctctatgctcggtatgctatcccacagaatcccccgaggaccatcatcgcgccagtgtagatgagtaatggtccctatgacgaccaaaccgcacgtcagcttcaggcaacgggaagttgcggtttcaaggagacggacataattgtgttccccgtaacccccgggagacccgttcaacgagctgtattgcagcaacgcggatgcgacagggcctgcaggacccgtcctgtcagtatcgacggaaggcaaggtcgaacagtcgtgtgcttacccgaagttacattgccgataccgcgggcaaaggcaaagacggagaacagcaagggcgggagtgtaggatcatcacctgcaaaacacgccgagatgcatcagagcgaggtggatggacgcggattcgaccgcgacatacgagcgatgacggtgatcagtttcgtccacaaggctgaaaagctgagtccgagaaagccaaagagaacgacaaaggcgacgagggcgcccgagttggtggcgaaaccccagagaaatatacaggatagcgcggagccaaagcacgacagcgagatcaccgctcgaagaggcgccttgtccgacaagtagccgagaatgaggagcccaggtacagaagcggctgtgaggaccagaacatcgacgtcagaatcgcaagtgaacggtttgtagccggctccgtacttgccgttcatgatcgcgagaaggatgctgccattcggttttgagatgccgagatcactggcataacctgcaggtcgaacaatgagcggtgtcatggtggcgctgatgggtctgacatactggggatatagactgcaggtaagaaattcgaaagcgagctcaaaaggatattgccggcaaaggcgtaaaacgttgtccggcgtaaaaattgaaggtctatcgaacctcgtccagatagagtctgtttccatcgggccaaaagccgagagacgggcttctctcgccttgtcgatcgttcgtcttgactagacatggaagcgatgggaatacgtggtctaatgaaggctagggcgatgccgccgaggatggcatagcccacggcctggaaatcgtccgggtgatcagcgggtaggtgatcatgtctcagcgagacgaactcactactccgcacatgcccgccttgtagccgaatcgatcgataagaccgctcatgacgaaaggaaagacgaaacctcccactccggtacctgggagtcatacgaggtggagtcctgagcatagggccgagtgtgtacgcaagctctctgggtcggctcaccagaatacatgatacccgacgccatcccccttttttgcacaaaccattcgaagagcaaggttgcagccggaagataaaagactgacgaggcatatgagtcaattgtaatgctttcgttcgtgccgactggcggctcacatccgctaatggggtagaggcctcccatagtcagcaacaactgccatggctgattttgatgacgaacgcgtcaggatcggttcttctcctgcttcatttcccttgatctcgcgacttgcctcggtcacgaaggcacttccaatcagactggcgactccacagacaagaccgagaccttggagtcgcatccgctgacgaggaaaagcttgtaacaagctgattgaggagcaaggtgaacgcgattagtgagtgtacgagcccgaacgtagcacatcgactcacgggccttgagcgatggcggccatgtacattaacccggattgtagcgtcgcggcgatggtcaagatgccttcctgaccactatcccggaatttcacgctggtccagtattcatggagcactccgactgagaacgggaatccccagaccaacgcttcgatcaaggtcgctgcggccaagaaggaataagcgtgataaccacggtcgtaaggcaggagttcttggggttcgtgagccgaggtcgacgtccgcgtgtctgcggccgagtctccggtctcgccgttgatcgtagctagctcgatggaactcatatcgatgaggcttgacgaggagaaagaaggtaccagtcgaaggtaggtcttgtacgagccgcgtgcgtgtcggtctccgcttagctttcgggttgacgttacgggcaagtgcgtacgactgtcgacccgattggcagtctccagtcaaggtacacgtatcgatggggctcacgctgggcttaaaacagcgacaccatttgtacgaatgataacggtagggttcaacgacacagtcgttcgatcgagcgatgtcgaacttattgacgacggtcattgtgctacaccactacacactactgtctcaagtcgtcacagtgaccgaggtcctttggatatcatccgaagacctttcgattccttaatgacgtgtcaagtggtccgcgcgtcaaaaggcgactactcggcttgattgcaaactggacttgtaagcaaccacaacaatgatatagtagtaaggttggttcgtaacaggttgcagatctagttgaattgaacaggcaacaatgccttgtttagggtagcttgttcgagaagtcctagttggcttgaagacagggtacgaattgtctttttttgcctttggatcatctcggtttgtaatctcgcgctcctcgacctggacgtctcggcatggacttgcgatccggtcgacctgtactcggccaatacggtcaacgtcgggcgtcgactgaaaccgttttcattcggcaaatagcggccctttttcttttcgagggtgatcgtctctttcgcttccgctctcagtcgcttccagactcgatagaggtgggggggatctcgtggctgcccatgacgaaaaagccccgggatctggctggccagcacgccatgaccagaagaagctccactcgcttcctctgctctgctggcaggtgggtccggaattgaatttggtacctgaacgacgacaaaccgcgcggaaggggcaggggagctggtttttcgtcgtttcgtcggtcatccccgggggacgacatcgatctcgatccctttctcttttggaaagagggtcctcgacgaatgataccgagtcctcactccatctcagcgatgaaaggggcccgacgaattgatccccggaatgtacgtcgctgccattccacacgacctcgggctacgttgcgatcgacatcgccccgatccatgttcttcccccgcaagtgttttgaagaagagaaaaaacgggaaaaatcgcttgtttgttgcatgacaagcaaagcgacaccgcccagactgtcgagtgactgcaacacgtctgttttgtttgtcaggcaaccaaaggccgggcaaggggtcgacgcggagaattgatgataataccaagagcgggtcgtcctgtcatacaacgccggaccttgaactctaagtctcttgctgtgaggaggggggattgaaggctgacgataaggagcagaaaaaagagagacacaggtgtagtagcgggcgagtgagtcgtctactagctagtagagtctgtgccagtcagacgccttgtcacgcggagaagggggggtgaggaaagaagagcaagtgttcaagccccgaggcggcctcgaccggacgcatgcgccggatggtgacggacctgaatttagatttctcgtcctctctgtctctctatttttttctgatctgcctgctgcgttcaccaccccgcataacgaccacgaccatacgccgaggagaagaataaaacaggtttcggggaaactcttctagaccctaattgtgacattcgaatgttccttccctgttgcctgttgatgcttggggtctaggggtaactgccctttttttccccttcttcacccttcgctgctatccataataaaccccaatcacccacgcttctcggttcgcttcgcttctccttctcattctctcgcttgcatctcgatcctttttcgtggctaccacacgacgaaacgtttccagccaaagatacccgcccttcggctgccgtcatcatcgtcgtcttcatcatcgtaccgaatcctggggctccccggtgaactttccccttttggatcgacgggctcggatcatttcattccgcaaagctcaatcggacctctttggtcttgcgccctactttcctctctgagtagtgcactgcatcacctcagcaatatcccgttcggacgaccttttcatatctgctctttcgacctctccgtgtatccaaactagacgatcctttggtcgatttgataaccatcatacgaaccggcttgaaacacggagacgactcaagataggcgaatctcggggcgcaaagtagcaatcattgttgtagcggcaccggcacagcacagccaaaggacgagattttgcacagccagcagtctttttacgccaatcgtctaccatcacccaccaccacgcatcttgtcattcagtcaacggcattgttgtttgggtcaaacgatcaaatcacacccacccacctcaaccgcatacggttcggaaaaccatggcatccactgctacggccatagcaacgccgcccaccttgctccctcccttttcgtccgactttggtcctcgtcctctgcctacggctgccaaaaagacatacgcagacctgggatcgtcgtccatccgttcagcctacaacatgagcaccctcgccggaccgtcttcaccccccatgtcgtcgtcctcgtcgtcgttccctgcacagacatccggtatcaaggtcgtcaacagcaacctccgagcggcgggatccagcaatagcggtttcagcgttcagaggagtacgagctcgtacgccggtccatcatccagtcaggctggcagtagtagcagccgcggcggcgctctggcaggtccttctaccctccgttccggcgcctcgaacaggtcgtcgagctatgggcaggacgggccgaacaagagaaagatgttttacgccgtcgctgttgggcatcacaaggggatctacgagacgtgggcagaggccgaagagcagatcaaggtgagtcaccggtgcgcccggtcgggcatggaaaccggatggcggatggcacgactgactttgccgtttcctactcgacgttgaacgacgcccggcgcagggccatgctgcacctcagtggaagacgttcaagacccgtctcgctgccgaatcttatatcatcagctcggcgccgtacgctactaccgcgcctgccgatgccgataccggcgcttatgacatgcagctcgaatacccatcttcgaccccgaattccccgacgtatgaggcgcccttgcacgaacgtctccagcgtgatttcccctcgaccaccccaaagtcggcaccctctccgccgctggccgacttgcagcccccgcgtccgcatttcgcccgtgggaatggttccaggagctccagccccagttccccggtcaagaggagcagtcccttgcgacaagaagtcacggatgacgaggcggaaaagatggacttggacgggacgagtggttcgaccgggtcggatggaaacgtcaagaggaccaagaagagagcgtcgttcatgagccgactgtcgaccggattgttatcgccgccgaccagccccgaggctgtggccaaggggaccaagaccttcagggtcgaggcggtcgaaaggcccgtgctcgccccgcctatcgtcttgcctccgaccgacgtctcgcgacctaacagccgatcgtcgagcaggaccggccatcgatcttccagaccgcctagcgttcgatcgccaagcatgggggatgtcgccgccgccgttgcctacgagcaaaggccggaatccatccgtagcgtctcttcatcgtcggtcgtctcgagaaacgcaaactccgggtatcgtcctcccgctacaccgagcaagggattgtggggagacgtcacgccgcccatgtcgccacccctttcgcctcccaacgcaaaaatcgctcatggcagagccgcgtccccctcgggctctgacgccgattccgaggggttcagctcgcccaccaccaacgctcccaagttttctcgatccgccctcaaaaagcaaggtgtcctcttgcccgtccccgccaacgccagtcgatcgtcttcgcccgccttatcccgatcgccgtcatttacgagcctcaagcgcaagacgtccaacaacagtctcaactcgatcggctcgtttggctcgttcagcgccctgagggacagactcgctgccgttcagatcgccgaggagccgcagaacggggagagggaaaacatcgctccccctgctgacgaaaaggtacgaccgggtctcgcctctcgttccatcagcaaggactcgctcgcgagctgcgcttccatctcgagctttgcgaccgcccacgaggaaatgccgccagcaacccccgcgaaaaagtctagcgaaaacggtgatcatcagctcgccgatccagaacacctctccccaatccactcgaacgcctcgggtagcgaggatcatcacggtagttcccgctccgatgccactcacacgcaatccgaagcgtgtaccgggaaatacggcaacgatcgtaaactcggcaagaaaaagagcttcaagcgtctccttcgcgcccttggcttttcaaagatggacgaaaccaatgaaaaggcggattgggcgaggaggtcgagcgcctagtcagatacaaaacgctgccctgagagcctttcgtctctgccggccatcctctcgcctttttccaatggacgataatttcctcatatattcccgcttctctgttgatggccatatcgcgcctcgcacttcacgctcgttgtatctgaacgactcgcgcgttgatcacgccatgaccagaatcttatagtttcacgatgttgagcgtttcgtccgcgctgtccccttaccatcgaaaagtcgtgaatatcaagttctcgggtacatactgagggggcggatcgaatcgaattgatcgtgcttgaggatcgaaggaatcggtcaggctccacttctcaaggcggtctccatttctatccttcaaacaccgctcggttcgtaccactaccaacgctgacctggctgttcgcttgttatctcggaccttcgacatcaagcgcaatgcgttgcggtggcagtatcactctacattcttgtttggatcagaccctccagtcggtgatcatatcactaagagccctcggaacggtgcgacaggatcgacccgcgaaacgaaggaatccccatcgtaggtgtgtctggatcagcccacacttggcccttactccgatcgtcacagtatgccctccaggtgaccaatttctaccatgccccttgcgtgaccttctgataccttcgttggcggagtctcaaccttgtcatagccataccgacagcgcatgcatggcgatataatgatacgattaagatacagcacacgagatccgcgcgaccatcacctgtctatcggcttgcgctcgcctttgcacggatttcccgcaaaatctgctcgcaagctatcctcgaggcgttgtaggcgttttgaaactgtcatacgagacaagcttcagcagagtcaacgcaatagcaaaagcttcgtggactcacctggacgtcgtcgaaagctccttggctctcagtatatacacattctcctggcgtcgatcccgagccggcttgacctagaccagctccgaacgcccaggcgaagacgaatgtgctcttggccatcgtttcctcttccaacgtcgggtccaagatcatcgtcactccaccctgctcctcctcctcatcgtcttccttgtctccctgctgcgctgccgtaccatccagggtcacgtacgaggcgtcgaaatcatatcgtttcgatctcggccgcgaggggacgaccgcgatcgagcacgctacgggaaccccgaggaggtccacgctgcccccgtccatgatcgccagtgtcgcggcgttgacgcaggtcgctcgagcggccatcgaagagtagttgagggaggaagatccagaggtattcgattgaagggttagttgaagggcggctttggggaaagcatgaacatttaggagtggaaggtagatgctctcgagcgaggccgcgatcgctttagacgacacgcctgcgatcgcacatgtaaagtgagcatatcagaggcatgagcggctaatatgacggcggggttacgtacctggaatgctctcgagcggtcgatgcgttatccgcaacgcagctcggtcgatcagttcgtcccgtcggtcagcttctgatgggccgtggaaacctgcaatcacttgctcggcgcctgtagttcacagaaacaggacatatagaggatatcagattgcatcgatttatcgcatcggatgtgatgtttgatggactcaccgaaaccgaacctcgcactgccatcgctcttgctcaatccgccaatctcgattcctaatttcctcatggttgtcgcacccctgccatcgcttcgtcgatattcctcggtctgagccatgtctatcgtccagaattcccttgtctggttatatgtgcacggagagcttagactatcgagtctgtgggtagtcgaactcgacgaggtggttagttgaattagttgtagatttgattcatcatcgttccaacttttggtcgttgatttcgcgtccgcgtttgcccgatccccgggaatcagatcaaggtgaggagaggtacatctcatcgtcgaaagctccagtaaatgacctatcgccccgttcttcgacccgtctgacggtcatcacttcctatttagtcaggcagaagtacactataaacggattctccaaaaatgtcgtcgcaacccgccactgctggagatcgaggcagacggcttgaacaccaggaacgagcttacgagttacaaaagaagggcgctatcgaggtcagtcgagctcttctgcaatagtaaagatctgtccggttctctttcgttttgctgaagcttgcgacccgtcctcgcagggaatgatcaagtacaccatgtacacgtccttgttcgtcaccctcggacacttgacatggcctgctttcaggtacgcacgtcatccgttcgacccagcccgctatttccgttcgactcattccgataccttgtcccgcaggaaacaagcgatcggactcaaggcattcatcatctcctcgtcaacactagcgggcttggtgtttggtgcggaaaagtacctgttgcgcttcgaatcccaacaacgagagaccgagaacgacatgcgccgacaagcgaggaatgacctcgctcgacagggaatcatcgcgaccgagaccgagatcaaaaagtggaagggacagagggacgaaaaggaaaaggcccgggcggcccgagaagcagaaaccacggcttgaacgaggtctgggatgtggagcataccttttcggaaagctgtaatcatagaaatgtatcaatatgaacccgagacatcattcaagtcatttggagcaagcgggtgccgtcgttctgaaaggacactttatcaagtttcatgttgtctacaagcttacaaaacctacataccaagcatctcgcacatgcacaatggtataacgatagcatttccgacgttgctgcgaaaccgttcccttgctcgactcggggcagtcgtctggtcggaataagcgagactactgcagctgagtgtagcttcccgggaaagaacccgtctggccgtgaaccttgcccgtccaccagtcgtcctgggattcgcttcgctcgatgatctggattcgatcaccgacagaaaagctgagatcgccttcggcctgataggcatgggacgaaggctgatataagtacacgctcagcaacgcgctcgtcgtgacacgcttacctgagcagcaaaatcgaatagggcaacgcagtactcggcgggtggtacattggaagcggctcgcttcatgggaggaggtgggggaggcgccttcttgatcgaaccggcagagctcagtccggcaccgctcttctcccccgtagtgtaagggggaggcgcggccaccatcggtgcgggaacggggggaggcaaaccatacttgctcgtcgacgcttgtcgaacgagactgggcgagttggacgacgtgaccgaggcggttcgtccgagaccgggcttggctccatagctgcttcccgaagcgactcttcgatcggccatgagtttagctacggaccgggtgacgaatgattagggcatgtaccaatttcgcaagacacgcgactggagctcaccggtcgagaccattcggttggtaatggtgagctcttccagatgatcgctcgcatcgccacgttgctcaaagtagacgttctcaatatcggttctcgagagatcgtacttgccatcggcaaacgattgcagcttttcttgcatcaggtagaagcagttgagtctgaaagcgagtgggcgccattatgaatatacatgcaaacgcggggtatagggctggcgaggtagtacgtactgcatgtagtagaagctgtggaagatgggctcgatgaacgaagtcgcgagctggaaaaagtggggcagttcctgtttgacgagcgtgttccagtgctcatactcgttgctcgcaatctcgaaatcttgctcgacctatggaaagcgttgcaggggcaaaagtcgtcagccgatgatgtgaacgtgcgtgctcgacagcgaatagcaaggacgcaccttgaagaggttcttctcatcgctcaagctcttttccttcttctccctcagcttgttgagcgagttgttgtgacggtcaaagtcgaccaactagtatcattgcagacccatggatcagccgggtatccttccccttcgatcgtcccacgtcccgtagactcactttgtggtcccgcttgacaatggtctttcggatccgcttgcagatatcctggagctccttgcaagggacgatgaccctcgagtcgatcagctcgagttcagggttgagagtctctgacaaggtcgttgtcaccagaccgtcaacaccgatccacctcgtgatttgcgattccgcagtcaagacccagggggggcactcacctcgcaattcctccatcaacgcctgataactcccgatgttctggatcgtcacttcggaattgggaaacttgctacccaagttgtattccgcaccgagaggggcgaataaggtgttgaacgagttggaaaaggaggagcccgagtacaagagcgtctggacggcatcccgaaaggtctttgagtctttaaggatcttttccgtgccagcttcgatggcggtgaatttccggttaaagtcgtcaaactctgggtcactggactctgcacgatgagacaatatgtgagcgatcggcaacgagcggatggcgggacggtgagacggggcttacttttggtcatgcctatccggctcgtgagctggtgaggcgtgctgtgccatccatcccaaaagccctttcagctcgcccgcgacgacgaatagctaaccgcctcgtcagttagaccgttcagactcaccggttcaccgccttcatgaatcccttcatcttgaaaagtctgcctgctgcgtcgtcagacagggataagaccggagaggcgggtgagtcaccagcaaggtccgttcaacatcgagcgcggacttacgatgcggtctgaagttggtttcaggggagctttgcgcgagagcaaagagaggtcaagacaagataagcgtatgtgtacgatgatatccggcggactgagcaggctattttcgagtcgcaattcgcaattggaagatatccccatcatcgtcgtcgtcgtcgttgccaaggtggtttctccctgtcttcgatgacgtttcccatacgcgcgcggccgaaagaagagagagagaagaggcagactcgacgagtgtgaaaggattatcggaaacaaatgtcacaatcaagacaggaggggagggttagggtcactggtcgatgtctctacactcagttgttgatgtacacatccatattacactaacaagaaaatctcaatccgattcgaaccgatcgacccgccgctctcaatcctcctcggcatgcccgacggcattcccatctttcaatccgagcttccgcttcttgctaggcaaaccctcgccatccttgacgtactcccgcttagccttttccctcaatctctccacctcctgccctgcaaactcctcctcggcagcccattcgaggaccaagtgtcgaccgagcaaatgggtatgtttcaaagcttccatggcggcttccgcttcggtacgcgtggtaaagtccaaaaaggcaaaccctcgaccgcccgaattgtgctttttcgggatcctgcacgacttgagagttccataggcgctgtggacacggaaagatatacgcacgggtcagcaactctgtcatgaaaaaagcgactcgtggcggggtcgggactcacctgaacagatctcgaatatcctttttgctcgcctcgaacggcacgttcttgacaatcatcttggtcgtcttgccgccctttttgctatcagaagcggccccacccttcttggcgtccaactcttctccctcccgatccctctgagcaaacttgacttcgagttcgtggccgtccaacttgtaccccttcaaccccttcaacgccttggccgccgcgtcccttgtcttgaacccgaggaaaccgaaacccatgcttaatcgcccagcagcgttcttgggatcgggtttggtggaaactcgagcaaagacgaacgaagggagggacgaaaacacggattcgagtcgctcggtcgtcgtgttgaagctcaagttcttgacgtacaaggtcgatccagcctcgttggtggtctcgtcgtccttgttctcaccggcagcgcccgaggccgcctcgacacgtttcaagacttcatccgactctttgcctcccgtcacaggtacgtcgtcttccgcttccatgtcgtcgacgtcccgcatcagaccctcgggagccttttcgaggtagatgacggcattgcctaaccgcttgtaactgactcccttgaacgccttgaaggcgtcgtcggcctgctcatactcgacgaccgccaacgtaccagctgggggcatgagcgtccgcttgagcgcgccaaagggctcaaacagggcacgcaggacgtccagggtcgtgccgtacgggatgttcttgaccagcagggtcgtctttgatcgaggcgtcgagactcgcttgcctccttggacgtcggcggtaccctccaggcgcgtgaggacgacgccgtgcttttcaaagtattttttcgtctcgttgatcacgctcgtttctgccaatgccaatttgacggcactgttgacctctttaccccgcccgttctcgctctcattgtcctcgggaagcagggattccgagtttagaatgtcagcctttttgatgcccatcctactggccacggacgaggccacggcatcgctgttcatgtagagcgtcgcccagttgagcccacgattgctctcctcttttctccgcttatcgacctcggacttgacgttcttgccgtcctctttacccaagaccttgccgaacaatccaccttcgtttgcgtgtccgctctcgccctcgacagtctcggtcccagcgactccagatccagtcgcgtcgatgacgaccgcctcaccgggtttgcctcgcccaggcaggacgtggatcaatctacccatgaccgtcctcccatcgacctctttccagaccttgacggcgtcggcgccgtttccaaacttgacaaacgcggtgcccaatggctgttgagtcgttttgcccatcgggatatggatctcggagatggcaccgtatggctccaaatattgtcgcagggatgcagaggtcgtgtggaaggataggtttcggaggaagagtcggtgagtctggaggatgagggattcttcgggagagacacgagatccagatgcgacgggagacggtccctcggcatcatcgagagtctcgacatctgccgtggaggaagccgcagcctgtcgtcgcttcaaccattcagcatcgtccagctctccatcttcgccgttctctgcagcttcttccactccaacgacaccgctctcgtccgacttgttcccatccggtcgagttgcctgctcctgagcttgcgtcgacgtcgtagggactgggatagcgttagcgtctgaacctttcatgacagacatgaactcggcgagggccttgctcgtcttctttggtgctggtttcgtggcctcggttgggggaggcaggttgctcttgaaagaggccgatttgccttgtttcttcgccagggtctgtgacgaccacacagtcagtcaggattcgtcatgcggtaacgaaccaacgtatactcgcctcgtcatctacgaaatcgaccttgatcttgccgctgcccagaaaagtgccgtcgaaccattccttcgccctcttcgcctcgtcgtcggtcttgtacccgacaaacgcgaatcgacgtttcgatacaagcttgacatcggtcagggtagtgtccgaaagctgagatggttgggccagatgagccttgaaagtcgggagctcgaccgtgtttggtaggtttcgaaagatcaaacgggacgaccttgtagtaaggtggcgggcgggtcagctctggcatgatgcaacaagtctcggacgacactcacatcctgattcctagtcgagtagaggctatgtgttgccttttcggaacgtgaactctgggcgacgaacgagagactgtcgagaaggaggccgtgtgctaacgtgtacgagaatacaacagaccacaagcaacaagtgtatacaggtaaagggtcgggcatcttccgaggttgactacatctctttcgataattatttgcttccgtgaattcgcccccgtccacaggatcgcttcggaagcaaaatcgagtcgtaaggggggtggaataggaaagggcaagcaagcgatcgagattatggaaaggttcaacagtcgatctgcttgacaactacgtatcattcattgaccattgacatcgctacaccccttagtcaagtctagtagatgatcaacgcaactcgatagtctgtcatgtcggcgaaaaacaggctactagtggtcggcgggaacggttacttgggcaagtgtcccgaagggcagccggggcttccaggtcagaacgctgatcagcggatttgttaataggttctgctgtgtgcagagccgctgtagcccgaggatggtccgtgtccagtatcaggtacgatcaaaagctcgtggtctatatgggacgatgccgtttcgaactcgttcgctgagccatcctcactttggcagctcatcgggacgtccggctacgacacccgcaggacatcgccgggcgtggaccaaccatgtcaattggcatcgcgcttccgctttcgaacccgagtcatactctgaattggtgaaagagagtaccgccgtcgtacacaccctgggtatcctcatggagggggattacaagaaacacgtcaggagcggcaacatctttgggttagctggagagatcatgcgggggtcaggggatcgagctgggcggacagataatcccttgatgagggggaccgtcgccaaggaggagaacaaggacgggttcgaggcgatgaacagagattctggtaaggcggcaatctgcgtttcgttctttcgaattgacctgatcatcttgtggttgcgccgccacgcagctctctccgtattgcgtacactcctctccacactgccctcgatcccatcgtccgcagacaaacctttcgtatacatatcggcggaatccatcttcagcccgctgatatcgcctcgttacgtcgagacgaagcgtcaagcggaacaagggatcgaaaggctgatctgggaatacaagcagggcttgcaacgggacgcaggggtgaggggagtctacgttcgaccgggtgagcatcggcatgatgatcacgacttttggaactgtaaagctgacaatggcattgataacgcaggcctgatgtaccatcctcacgaacggccgctatctactctaccagctgctctgcttgacatcacctctaggttgtcaggtcacctgccattctcactcttccctcgatcgacatcgtcgaacctagccaacccggccccagcgtcgggaccattcaagacgctatcttcgctatcatcctccttggccattccacctatccacgtcgatcaagtcgcggaatgcgtcatgcggtcgatcgagcatccacagatcaagggagtcgtggataccaaggacatgagaagatggatcggactagatgtggcggaagaaggagaggaagtggtcttgccttacaagacgagtggtggtacagttggtcagcgtggagggcagggaaagacaccttttcgaccgccaacaggagtacgggaatactcgacggtagctagacggttccgcactataggtgcgactcgcggattaaaagtgtacgcgccaggagcggggtcaacttcggaatcgcctcgcaacaacgatcaagggtacatcatcgagcctccctcgcccggacgcgaagacagcggggcttcgattcatatgtcttccccatctgggtcccctccacaggatcaggtcatcgacgccgcgtccgtcatcgcatcgtcttcgtcgggagagaacaggaataccgggaacggaacgatgggacgtagcaatcatccatatgcgagcatgacacctttaccggtggaagcggccttggcagacggacaagatccgctcaccctcttgccacctccagcggggctcactggacagcccggctcaggcgagggcgcaaaggtcgagtcgccgggatctgaccttggctcgagagcagagcagactggcagcagcactggatcggaagaaaattcacaggtcggttccgctaaccctcctggcgctgcaacacttgtacctcaacacccaagcccggcccaccctttcgatacgcatgcatttgttactcacctcgaaggtgcagggttcgaaagtccggtggcgcactctttgatgcggtcggtccggctactacttcttagcagaagtgctcaagcacgatccgtcctcttgcataaagaggatgtggagaacgctgcctaccttttcaaagccgctttgtcggagctacggaccgagctgaatgtgcgagcgagaaccgatggactagccttgaggagcgcgacgaatctgattcgacgcgaggtggatgcgctcgatcaaaggatgaaagaggaggtgggtggattgaagcatgagtacgtccgaccaggatatatgccgctgcgagtctgcgctgattgagaaatgaacaacttgtagtatcgagatggacatgaacaaccggaagggcgagacacgaagcgagcagaaggcatatgagatttcgattgaagtcagtcatcatcaatcgccacggatcacgcacgcgggactgacgttgtgccggattgttacaggaaatcaataacaagttcaccatctccttgggagatttgaagaccgagatcgagcaagccaagtgggacgctaccaggagagctatcagtgcgtcgagggtcgaatcccaatcccgatccccagctacctgtcgtcttctgacacttttccatctacagctatccttgcagccatcgtctttacagtcatcagtgtagtaaccttgacgtcagatggagcaaaggcagccccgcctcctccgcctgccctaccgccattcacagaggagaaacgatacaaggatactgggtcgggtgatgatcccattaatctgcgagagggcgacgaagaagccatgattcggatacgtgggctcgaggggctgagagtatagtagagagctgtagtcaacaacgtatagcatgaatacccatccgactttgcatttgctggattggcgtggacgaagacggtcatcgctgtgtattccttgttgtggcggggggaagctggaggtctatcacgcgcgcggaattttcggagtcatattcaagtagtctggcttatccgcaacggcgagtacagtggtgtagtggtctaggggtagtaccctaatgccaggagaccagaagttaagcaactgctcacttcgatacatacccactaccttgcttcctagtgaagcctgctagggtggggcatgattggattgaaggggggaagttcgcttagaactttttgtactcttgcggctctacatagtgtcttttttggctttcaaaatgtcggacccctcaaaaacgaggtccaggtcaagctgacttccagaggtcgtgggttcgaaccgggtgtacgagcatatccaattatttacgcttcgcgcgcgaccgcactcgctaacggacctagatacatcaatgttggactcgccttcgcactttcgattcccgaaacattgtacatcgcaagtacgacggatatgaggcatgcagatctcctaagccccttcacaaggaccagtattcagcgaatccgcgatatactggcttctacgaaagcacctgattctgtcagctgggacccccgcactcaacgatacctatacaaaggagatggggatcgtgtggccgagattaatgcaagaaaaggcatcaagccaggtcagggagatagaccgagggaggcggccgttttgttaccgctagtcaacttcaggcgggctgatttgccagcattcaagggaaagggaaagcagagagcgacggatgaagacatcatcccgggtattctcttgcaagtgcgagcggggcacatgagaatgcacgcaggagaagtcaggtgggattcaccgttcgatctcatctcataattgcgtcgagagtgtttaatgattcagttgattcggtagctttccgggcggcaaacgcgatccagtgagattcatttgtcgctcaacaactgcttacatccgcttagcaatgtccatctacatctacgacagcaagacacctcattataccataccgcactgagggagacatcggaagaattgggaatatctcctgaccaggtggaatacgtcggtcagctcgggccgagcgagctgtccctgggtggcatgctggtgcacgtgttcatcgtaagtcatctctatacaaggcttcgctaacgagtctaggaattgatggctcgaacattatcaggggttcgtgcactcagctcaaaggtactcttcggtgcggggcggatcggagacaacagcgatggaaccactccctctctcgacgcttcgagtttcgaaagacgaggtcttgagcgtgctgcctctccccttcaagtgcatgattgatggggattcacaagcagagaacacttacgagcggctttcttggcacttattccggggtgactgggcgtatcgcacggttgcggtcggtgatctaccggtggacggctcaaatcctgcccaagtcgacggaccacacgaaggattggaaggccagggccaatcgctgacgacgccaggacacactgcataccaggattatcacaagccagatcggatcatacttcccgaccattctattggagtcaaagagcacgcatcaccgtcgcaagagaaaaacagcctcgacgtatggggattgactggctggttcctgaatgtgttcatgtggaggatgggattctggggagatgtaagggacgctggtggcaaggttctcgaagttgagcaacctggtcactcctcgcggctatgaagatagtgcgtggtagtccggaggtcatatgcatcatgagaccatcgacgaattcggtccggcttgtctcaccagcttgcacaagagtcgtagtgaggccagctctggtcataatgtatgactgtcgcctacgcaaacacttcgtgtcgaacgcaccctagccaccttcctccaggatcaaagactactctcgcttgtctatcatagaacggcagcgactgacgcacatttggcacagttgaatgaaagctggtcaagaagcacgatgataactttatcctgcaagcgttcagggagtaagcgaggctgggtacaaccttcagaaagtctgttgtccagcttgtctttccgatgtgaatggatgtactcgagtcggtcctgcacggcgacagacaggtgatgcgcggtgacgtcaactttgtcaacaaacgatggccgagctgtcctgcctgctctttatctcagcctggaatggcgatgcgtattctgtcagaatgactagacatctatttctctttcgctagacatactaaacagatccttatagaccgcggcatgtccagcttggcagtgaagcgaaagcgatctgctgatgcgctacagggcgagtccagtaaacgaccgtccaaggccccggtaggtttacaggagtcgatccagaaagcaatcgccttgatcgagaggagcagcaacattatcctgctcgtcggtgctggtatttcgacatcagctggtattcctggtaagaattctttgatctcttctcctacagatctccagagcgaggctgatgctgtcgtgtaatgtcagactttagatcgtccgatgggctctacgcgtccttgaagaacggaagtttggccttagacagtcaaccaccagatattgggctgccagaactcgtgtcccaacctccatggtctcttacaagacctcgacgaaatgcggcattacagggcgaagtagccaggcaagcaatacaacaagccgaggacaagttctcagtgaccgatccgcaagaactgatgagcatagaagtctttcggaggaagccagaagtattctagtgagtcgtatcttcgtgtgagcaattgtagctctttgttgatcgtttttgcccatagctcattcgcgaagcatgtgcttcccgggaatcgactccccactgagacgcatcgctggatcagatcactcgagcagggcggtaaagtcaggatatacaagaatcgctgcactcgacactcactgatctttccctcctaacgctagatgctgagactttacacccaggtatatgcaagcaatcactgctcgaaatttaggctgagcctgacgagacctgccaatagaatatcgatcagcttgaagcgaccgctggtatcgaagcggtggtttactgccatggtgagtatctcatgcctgcatcggccattgcacgcaagtctgatccggccctatgataggatcttttggaactgcatcctgcatacgatgtaaacgcacagtcccgggtacagagatcgacaaggagatcaaggaaggcgcagtaccgttttgcaaggtctgcaagcggtccaattctgcaaaaggtcaagtgccttacctgagggtagatcaattaggtacatcgctcgagtccagccatctgattataagctttgcattggacagcctgatatcacgttttttggtgaacctatcgatgccgcgatagaggaacagcttgagacgttagtagaccccgtgcagttgacctagactgagccttcgttgaattcttcgtgatatggctaaaaatagggaccgatcaagagcagatcttctcatcgtaatcggaacgagtctcctgatccctccagtacgggatatcccgagtgagattcgaattccgcatcactgtgtgacgatctgaccaagatctttcactcagaaatgttcagcgacatacctcaaattatgatcaaccgtgagatgtcaaagttcatccagccagaagtaagcttgaggtccacttaccggtacagtgtcactgcaacaccagctcattctgcgattactagatctccctgatcggagattgtgacgacctcgttcgacaactgcgacagtttgaagaaacccgctttggcgaatgcgtgtcgatcatccctgagcattcgaccacaaagacggacaggcgttgcatttaggttgtaactccatcatcagattgtgcaaacttggaagtatccgatgtcagattcggcctgaacgtccttcatatcctatctatctaggatagtcaagtgctgtaggtgcggtgtgacgcatggtttcaggctccactcgtcctccggcagggctctgtcacgcgaagcacccagatgtacagtgttatctttttgatcgccgccgcgcccaacttctacctcttctccgcatacctcgagagcatcttggtgatcagactgctgacccctacggagctgcttgacgccgggggtgtccgtagtcggtgtggaagtcgtccttgacagcgctcggaagagcctgtgatcgtgcttgttgtcaacttgtctcggaactcgataagtgagccccctctagcaagctgggatggaaatacagggcctgagaaggcgtttcttggcgggaggttaggcctgacggcattatgtggctgaccggagtgatcgtcgatcgattgatcgcagaaggttatgaccgtatgatttctggtctgactgagaagtctatcctgaattcaccgcactgcagaggcggggcggtgacgggtctgcttgccaacctctgtgtcttgcacgcgaggtggggcaacgctcacgactctgcgggtcactcccgtttcctggatccaagagtaatccggctgaattcgccggaataccttgaaagattcgataatgagatcaatgtgtcgacagacgggtaaggcagcaaagcttccatctctttgtgaaaaaatcgcatcctggtgggcattggaggggtctccggattgatcagccgaggagggtccggtgcaattacctggatacgatcacccgatgtggcttcggattttgaggccgcgcgcgatgtcacgagaagactggcatccctcaagagctgtcaccttgatgcctctaccgggtcacacggctttcccgcgccccggatctggtacaggatcggacgaatcgcatcgaatactccctgatctcagacctctcacgtcatcagttgatcgtagccttgtcgagaaagatgagccggatttcgtttgaagatcgagtctgcctgatgactggtcttcgcccgatgatcatcgccgcctagcagagccgcaggttccatcgaggaaggcacaatgccagatcgcctggcaacgggagcagtcagggatacaacgttagatgatagagcagctaagtcttacaatttgtgccgtatttgggcgctttgtacgttcagactgtgctaaacgggcagcaaatctagtaacagattctgcaaaatgtctatcgcaggctgaaactcaacgggctcgctttcggcatcgacgaaatgcgcatccgaaattgcttccggagatgaccgagctttccagagatcttcagagtcctgcatgaacgattctagaggttcacaaaactataaacgatcggtcttgtgaacacgaaactcgccatcatcctttcgtcggatcgctcagaatacagcggaaacctagatacgatacacaatggccgacaaatacgacgagatgtcgatggaggagcgagcggtattcgacaagcaagcgaaagaaaaggaagacgctgagcagtctagtgcgctggccggttccagccaggtctttgctgtgggatgccgctgacaagtacatcgccatccagctttgccttacaagtggagccaagatctcacatccgtatcagtagccgtgcctttgcccgcggggacccgggccaagagcttgacagttgaaatcaagaagacgaagctcaaggtatgactcgcttcactctagtgcataggttcaggtagtgatcggctgaataccggcttgaaatacgtaggttcaggtgaaaggatctgacgaagcgattctagacggaaccttgttttccgacatcaaggaggaagattctacatggagtatcggtgagctctcatgaagcttggtcacctagtcaccgcttgactctagcccttgcaaagatgacggagtcctctccatcgagctcgaaaaactttcgtgaggcaccctgtgaacctgtggaattgcggatgactgatttcttgtgcagtggaaggacgaccatgggtgcctggtggcctcacgtcctgacccatcatcccaagattgacactaccaaaatcaccccttccaactcgaagctgagcgatttggacggcgagacgcggggcatggtggagaagatgatggtaagtgtgcggtagtcctttctacgttggggatgcacattaattcttttttgtcgcagttcgataatcagcagaaggtatatatggccgagactgcgtcggcttcgagccgatcgttgactccaaacgttcttctcctccctacagcaaatgggcaaaccgacctctgacgagaggaagaagatcgagatgctcgaaaagttcaaagcctcgcaccctgaaatggatttctccaatgccaaaatcaattgatacttgagcatttgctgattagtagaggcggccagacgatgtttgtctggatagtacagatataaataatggttacggtttcttgatcggatcaggagatgtcatgaaggccaaagcattccttgcgatgctcagatacagtccatctgtgcgggccggaaaggtcgtgtccgacaagtgcaaagccaggtggaagtcgtgatgtttcgaaccggaaaatggagttgtcgtttcgttctaggtcgagccccgcccatttgagcctacttgcgcatacgccagatagactgtacagcaattcgtttggcctggaagtggacagatcgttagtgtcaaacggccttgacatcaagattagcgcctcataacgatccaattgctcacctgctcaagactgatcgcatcgttagtaaaagcgagcgtatcgggcttggcctctccgtcatcggccggctcgtcgttggctcttttcgagggcagatcgtcgtccgaatcggcgtccgaatcgtccatccgagccggtctggaacctgattctcgcaaaccagtgaacgttgttttgctcttcatatcagtgggcaggctagagagcagcccgccaccagtggaaagccgttttgaccctccgtcgtacggcttgaacgtagctgagatctcgccaaacttgggtttcatcccgtcgtcgtccgaatcagaatcggaagtcagaacgtcgtcgatcccgtcgtcatcactgtccatcccagccgggatgaactttgccttgccgccaacaatcttgcggactgcaggaggagacgctggagtaggagcggcggtctttttggcctcgctctttctccggggcagaggtggtcctggacgagaccaatcccgggcatagccactgtaatcatgacggccgtactggccccccttgtacttgctgtactcgtccgtaaagcgattgcccaggaactgttgcaaatcgcatggtcacctacccgtgctgcaatcgaacctgaagggtttcgccgactcaccttcttgatgtgctcttttccgacctgggcgttctcagcgttgacccatgttttgacgttttcgaggtagacgggcgtctcattgtagatgtttgcgatatgaatcttcttggtgacacgaccttgcatagacagtgcgttttgcagctcactgacaatgaccgccatatcgttagctcccgtaacgccagaaagggatgagggacgcacggtttgcttaccgagccatggagtcgatgctctcttcgtcagtcttgcctcccaatcgggagtagatctcttccccaacctctgcgaaacgttcagcgtgagcgacgtgctttataatggccatgcgaatccggaacatacctttgataagctgttccatctccatattctccaagacgcttccaatgattgcattcgtcaagagatcggcagacattaaaggcagcatgagtcccgaagtgatggtagcgatggcttggtagtattcgacggctcgctgtgaagattcaggagttagcaaatctcgatatcgctagtgagcctatgacatcagacctacgtcataagtggaaaggttggattcgcaagccacgataaactgtgaaacgaaaataaagcgttgaggcggtggaaaaagtcagacaagaggaccagaccacctacacaactgatccctcgagcggccatattcctggccaagaccagcccgtcccaaccaccaggttccccctgagggaatccgtcgccacgttcgccaatcccatgaggaggggcgtccgtgatgatcacgatcatcttcgctgcgttcctcctccactgcaagtcacccagagccacagccatacccgcaatgacggcctcaggaccgtctccaccgccgccagctctcagattctcgaggaagctatgtagcccggatgtctcggaagtgaacggcaaggtcttggtcacgtaagagttgtcctgacccggatggtctcggtaggcgacgatctgggaggcgaggggaaggcgggaaggggggaatagggaagataacaggcaattcatcaagcgaggttcagctgatgacgacggttcaggagtactcgacttgacataccccgacacggagatcatccgcgtgttccatcttctcatgagcgatgatggtggtgcagatcgtctcgatgtttcgtgtagctgcaacacagtcatgcacgatgtagcgttaggaagtcgttgttgtccgtacaggttaaaggtcagcttaccactagcgatatagctgcccatactacccgttgcatcctgaatgaagacaagatcactgaaacagatcaaggttgtcagcccgaccgcaaaggtgctatcgctcgaccctttgctgagagcgtacatcatcttcctttcagaatcaccgtcctcgatgacagtccagccctcatcaccgtgaggtagtccaccatcaaccgagactctagcaggtctgccgatcccatacctttccgcctttctgtacgatttctgtacgttcagctcgacctgtgtcatgccgcccttgatccagtcgatttcttgtaatcggtctgcctgttcagtctcggtctcgtgggtaggtacccgtgaaagctcaacaagggtcttctcacgccaagcagtcttgggagagggtggtagttgataacgagggatgacctcgtcgtctgtgagcaggtcagaacagcgatggatgttgagaccacgggagaaggtggtttcgtattgtcgagtgcagtgcgagtgtcgacgtgtagtggattgatcgaattcgggaattgcgtgagaagagaagcggaagcacagtgatctctttagaaacgctagatctcacccgacattgatgatgatgaggaaagctcgccttcatccattccatcccacatgttcgtagcttatatatgtgtattcagatccaccaacgagtgtcgtctctccagccggctgttgtcgaggcctcgacgatacgaagatgaaccgcgtgatttgattgtcgctgtacaaaggctgatcccgtgaacaagaactgtttagcagcgcttttgttcgactagccgaaggggatcaaaagaatcaaagtaggtgtttcgagttggcagagtccgcgaggcccgtttaaagacaagtccgagcgatgagaaggatacaggtcctcgctaggtaacgatgttgatagcactgtgaatattttgatcaagatctctatcgtagaatgtagggtcgtcaccggatcgcggtgtcctgatcgtatttgacgtttgatcagtttgatgggattgatcaattgcaagatgattcctcatcggctcccttgccccggcgtacggggcaacggggaatgcccgcggtggatgccctgaatcacgtgattcactcccaagaacgtcatcgaacaataggcgtcatggatgtttcagccgatttactcgacccgttgatcgcctttctataagctgatcacttccacttgagaattgtcgggtctctttgttcagttatccacaataatcgtcttttccttcaaatgggacatctagattggcagtgcctggaacggcagcgaagccagaatatgtctgatccaatgaatcccagcttgccgcgcgcgatcgatcgatctcaacatgactgcttcatggctttgagcgtatgcgtgctcggaaaatggaatttcaagtgaactaccagccaaatactcctggctctgttcaacttgagggaagatatcggggtagctggagggttcatcattgctttacaggctttcttctgccacacgatgcgacgctcgttactgctgtattaaaatttcgatatgtcatactgattttcgatggagatacaattttggtggatggtgatcctatcctatgctgcaaagctggaaatgcctgaaacccgtttacttgttgacgggagcaccgtactgtgttgaagaggattcaagggttgccacgtaagccacggtcgagcatgagaatcgaaacgagtgacttctcaccttgtacttggcatcgtgagcctggccattcttctcgtcgtgagactggtccagaacattggaaccctattggtgagaccggtgtcgatagatcagccatagcacttctatgggatcaccagccagacgcgcaacccttgcttacgtggacgggggcatccttcatgagctcatcgttgacgttctcaataggcttcttgtcaggcgaaggggtcgaagtcgtctcggtcttcttgaagccctctatagaagacggagcaaagaatcagctccatactctcctgtcgagttctgggggattggctcacggtcgttgaccgaagggtcctgggggtcgatagcgtttccggcagccattttgagagagatatgagattgggaaagtgctgtagaggtagatactttggtaaatctcatgtagcatttgtatggagaccgccggacaagaaatcgctcccctctgttgagctcttataccttgtcggatctggcatgctcccgtgaccgcctgcttaggccatcgatcgagagagtgacgtttcggtcgcgcttgcgaactgtgtgatgatgaccggcgatcaaaggggcgacgaggccatgacgtcagcttcggatcccgacagaatcgaattgacatataaccacctactgctgacctctggctcaaaggcaactttagcctgaccggcaaacggccgacctgatcgtatcgcagagcgctgcatattcacatacacatatacaagcatcacacaatttcacacaaaaatggcccagaaccactccaaatgtaggttagacgacgtcgagtccgctagattgttgtatgggcagcgcttctgacccctatgctttggtctgctgctgcagccgacactttggctcacgccactccctctctggaccagaggaacgcctctgaggcgcagagcaccaaagagcagaaaaactcgttgtcgcccgaagttcaggagcagatgagacaagctcagtgtgggtgtcatcgcgataccatcgcctcaaagatcgtattgtgctgatattcctctcgttccgttagtccctgatgctcctcaacaggtccaacagcctgaaaccaacaccaacaccacatccaaccagccgtcttctcgaggcaagaccatcgatgatgaacttgatgccgaggacgctgccgaagtagccaagaaggaccaggcgaaagcccagtctgctgctgctcatggcaaggatgtcgatgcttaggcaaatagtagcggcgacgctgggaatggacgtgatcactccaagtattactgcaagacgaataaaggggaaacagcccgcgtccagaaaatatcaatatgattatgcgcataatgacatgacctccgccagatggttcatgaccgaagcccgacactatctccaaattctcgaccagcacttttcacgcatctttcttgctgcctatacccagcgtctctagatctctagcgtatctagagacgcgatttcgctttcagattcgagctcgacccgtagccggcccaagcgcttcagttttgcttccgaatcagattcggaggtaaatggcgaaatcggctcggccatcttcgattatatgagcggttgatgatcgatgatacttactatcgtccctacgcagaccgtcgtcaatgccgatgtccattcggggtgcctcaacgcatcctgcctgatacttgaacaagttaatacaatcacacatcaattggactctcaggtatcgatagccatcaacctatctcgggtatacgcttatcgagtttcggggacgaccatttctggatcaacgacacgacaatggaagcatcagagcatttcgaggatgcggcagcatggctctcaagcacaccagcagctgcaactctatcaaatgatactaagctcgaggtgattattacgcaagctcgactggagtgattatagctgatgtcagccctttgcgtactttagatttacggcttgtacaaggttgcgaccgttggaccagaaccgtaagttctcggaggatatctgggttcttacatcccggctatgagctcacaatatcgtaacattcgtttttagtgattcccctgcaccctccttcttctcattaccaccgactaaagcaaagtggaacgcttggaaaacccaaggtgaagcatatggcgataacgtcgacggagccaaggaaagatatgtcgagattgcggaagatatcggctaccgaatcggtcacacgaacaaaggaggagtagggggagttgtggtcagctccatgaccgataccaacgcaaatacagacgaagagtgagctgcagctgttgacagtcagcgttgacctcaggcttgccttgagtttaccttgcttgcgttttctcttaccccagacaatatgagccagtccacgctgctgctctggacggaaacgcaaaggggctggcacatatcctggatgctgaaggaggtttgattgatcgtcaagacgagttcgtgagtatctttacggaggactttcctcccgccatctcagctcattcagaaccatgcaaccaaaatgcacagggaatgagtccattacactatgcagcagaccgtggacatgaagatgtcgttcggctgctcttgaatagaggtgcagaccggaatttacaagtaagtaattctgaccttgtcgctaaatcctcatgttgttgttgtattgctgaaagctgcaaccatttgttctgacccatcgcttaggataatgacggactgacagcatatcaactggctgagccaatgcagaacgaagcagttttgagccttcttcggacatgacgggaagagcgattgtgaagatgttcgcgatcacgaatcacattatatactgcgggagcgtgacgatctcctcgcctgatgcggaaccagctagtggagactagaccacccgatgcatttcaatcccccaatccatagacagccatatcgttaatctactcgtatcgtgtgaccctgagcgagccttaccttacggcatttcgcgggcagaccctatttcgctcatctccgatatccgaaatacccctcggcatgatgcatcatggtcacacccaaatctcatcgagatcgccgcatcttcccgctgagcatcgtatctcgctctcggtcagacacgaggctcaagggacaaagtccggtctggataccggcttctatctcatgacttaaaggacccagctttatacatcgaggtagagactcccgagaagacgtatcgatgcgtgtctatttcacaggaaacgcttctgcactcgcagacatgtcatggaggacatagcgatacaagaatatacatagaagcctgttgcagatcaagcagaacaaaatccacgataccagcttcgccttgagcctacttccaagatgcggagcaccacgccggacggtatacccatgattgatttgacacccatcgacattgcttctgcgggtctggtatctggaaccacaacacaggaagctgacgtgaggcgagatctcgagagaaaccgtttgaatgatatcaagaaaccggaagatcaggtgcaaggccttccacatggtggtatccaggcgccaactggtgacgtcccttccgatatgcctcatgaccaaattctgccaaaggccatcgagcgccgggcgtcgacttgcagcgcgaaaacgatggcggaggataagatctctctgagcggcaccgcagattatttgagaaaggaggacgaaaccaaaggcaatgggtaccagcacaaatctaaactgagggatctgtccgaatcggatgctcttctgtcagtaggcaagaagcgagagcgatggtttcaggtatggcggcccaaacacggcccaaggagacccccaaagagcctagatgacgccacggagatccctcttgcaaaagccaacttcttaagtcaactcttttactccgtaagtcgtgagaacgaacagttacacaatttagcgctgattgaagcgttttatcgcacaatttcaatactagtgggccacacccatcatgatattgggttatcagcgaccactccaggcgacggatctatggaaggtcagtgcgggtgctctgatttgctaggcttctgactcaagtgatggtctggcccttctagatggaccggagccgtgaggcggaaccgcttgccgatgcgttcttggctacgtatcgcaaacgaagggagcaagcggaggaatacaacctgcgcctggtttctgaactctctccatctatgtggagaagaatgaggtggaatacccaagcagctcttagccgagcggtcccgagcgaattcgaagccttttcagccgacaaacaacccaatctagcacagaatgacaggagtcttcgttatcgggcatacgaatctgaatggcgacgaacaagcggacgaaagcgtgcaagcattatatgggctctcaacgatgtgttgactggattctggacggccggacttttcaagattgtcggagatatgtgtcaactcatggtaccgctcgttactaaacaactcatccttcattctcagaaaggtaggttcgaagccacttaagcgaagatccgctgaaacactgatgtaacatgcttggatcacagtatacgctgctcaccaaaacaatacgccacaaccgaatattgggcctggaataggcatggctttcggagtgcttttccttacgatcacggcttctctcggcactcatcaggttggtttgagcgcatgtggacacctatcccaactgacgtttcctgttcgcagttctttttcaaatccatgtcagtgggtgtaatggctagagctactctcatcagtgctacgtacaagcaagttgtcagtttgacagtgcgcgagcgggctatgcacccgtaagtcaagacccgatatcgcaggcagcaagacgatcccattctgaacgtcttgatcttgttgttcatcgtcagaccgggcaagatcacttcgaatatcagcgccgacatcagtcggatagattccgctgcacagtggttccatgcggcgagtcgcacttggcttgggcaacattcgcatacatacaactgaccaatcttggatcactcaggtctggaccgccccagtccaagtattggtttgcttgatattgctgctcaccaacgtaagtaaaccggacagagaccgacgaagcaattgccacaacttcagactgccttcagatcgggccgtcagctcttgtgggaatgtgcttgtttctgctaatggttccgcttcagacgaccttcatgaaggtgactctccttattgtccggaggcgtgacacaatgttgatggccagtgatcgcagatatcgttcagtattcgacagaagtcgatgaagtggaccgacggccgatcgcgcatcctacaagagctattatcctccatgcaaatcatcaagcagttcacttacgaacgaccttttatgaagcgtaagttgcactagtgtaagcttccagcaataatcactgagaccgcagcctcctcaggcatattttccattcggaagaacgagctcattggcgtgaggaaattaatgtacatccggtcggcaaatcaagcgcttgccttcagtgtgccggtaagtacttcccctccatactcgggcaatgataattgacttaccttttgtggtccaggtcatggcttccgtcgtcaccttcgcctgctatgcaggaattggcaatgagttgaccgctgctgaggttttcaccagtctcagttggttcctcttgttgagacagcctttgatgttcttacctcgagcattgtcatctatcagcgatgcacgatctgccgtcgagaggatttctcctgtaagccgctaaacgccaagggcgatcgcgaatcgacatattagctgacgacgaggattagctttttgaggcccacacgacagaagcgaagttggacatctgcgccgacaggttgaacgcagtctgcgtagagaatgctacattccagtggctccctcaagagccgagagagcttgagaaaaaggacattgcggaattgtcacggtcaagtctggcaagcaatgaaacgccattccgtttaacaaatatcgatttagttatacctcgcggaaaaattgtggcaatcgttggaccggtcagtctgcgatacatattaggccaactagcctatattggtgatcctgactgatcacgttttactctcactagatcggtagcggcaagagtagtctgttacaaggcgtaagacctttgttttgaacatcaaaataccaatcgaaaaggttgtctgatatcttccgtatgccttcagatgctgggcgatatggaacaaatgtctgggagcgtaaaattcggaggaaccgtcggttacgctcaacaacaagcttggatacagaaccttagtgtgcaggagaatgtcacttcctttggaaaccgtccattcgacaagaatgcttattggtcagcgatgcacgactcggcattgttgagcgacttgagtaagacactcgactctgtcacgcaactcaatctgactgggacgtttcgcagggctacttcctgatggagatctcagcgaaattggcgagcgaggaatcaatatttcaggcggacagaagcgtgagtagttgcgatttgaaaaagtcttagcgtggctgataaccattgcagagcgtatcaatatcgctcgagtgctgtatcgggatcctgacattgcgttcttcgatgacgtgctttcagcgctggtaaggcttgatattgagcgaagccctttcaaatctgaagcattccaatctcgtttaggatgctcacgttggccaatgggtctttgatcacgcactcttgggcttgaggcgccgcaataagacggtagtcttggtcacccacgcagtccatctcctccataaagttgattacatatataccatgcaagatggtcggatagccgaagaaggcagctatgatgatctcctgagcaggaaaggaccttttcacaggcttatacaaaagttcggaggtgaatctcgaccgcataaaggcgaagatcaagccatcttggagaatctcatagcggctcctagcgccgataaaggccatcctgtcactcgggctgcagggacggggaaactggaaggtagattgatagttgccgaaagtaagctagttacacttgattctgggtttcactggcagatctgcgctgaaatcccacatggtttcagctcgcaccagtggcagcgtgagcggcgcgagttagcaagacaacgaatcagtattcactcatgtcttgcattacattaggtcggtaccagggtctatctggggtatttcttggcagcccgtgcgatcgtcaccggaccgctcctgctggtctgtgccgtcctgaatcaaggagcgcaggtaggtaaaacgatgttatctcggttgggactttcctcataaattgttcaatggcagattacagctaccctgtggcttgcatggtggcagcaggataacttcggtcaggtaggttccaagctgccttgacctttacgagaaaagaaaatactcacgatactcatcggtacagacgcagggattctacatgggaatatatgccgctctcgggatcttgcagtgagtttccattccgagtcaaggtcctactaagatcgctgaacatccgatgacaggacgagcttcacattcgccgtcggcgccgcaatcggatttctatgctattacgcatcgagcaatctcttcgagatggcgcttgagcgcttgtttcatgcgcctacatctgtgttcgataccacacccttgggtcgactcatgggcatattgactaaagacgtggactcaatggacaaccagcttgctgactcctggaggatgtttgtgttgacacttgtcaactgcattgggagtgtggtgatcattacggtatttttgcactatttcatcgccgtcgtcttcgtcgttggatgtggctatgcgtacttgtgagtgtctagaatgtctcaatcccccctgtatatccggtaatattgatacagctctccagtgtcgccttctatcgctcgtctgcgagggaagtcaaacgtctcgatgcaatgacacgttcgttactgtatagtcatttcagcgagaggtaagctacctattctctcggcagtgagtatcgactcatcacttatgaaacttcgaatcaaataagtctcacaggtctgtccaccattcgcgcgttcggcgaggaaaatcgttttattcgggagaacgcattttacatcgatctcgaggaccgcgcttagtgagccacgcaggcctggggcattattggaggggtcaagctgatataaagcatagtctactcacatgtgctaatcagcggtggctttcggtgcgattagattgcaccggtggcctgctgtcgttcgccgtagctataatggccgcgaaaggtggcgcgggtctgaacggagcgcaaattggtctggttctatcatacatgacaactttggtacaacaattcggcatgttcttccgtcaatccatggaactggagaacaacatgaatgtgagtagttttggaggtaactaaccctggaccggaacactgctcacactgtgtatcaggctgctgaacggatccttcaaaacgccactctaccccaagagaaagctcacgacatcgcatctacgctgccgagtccaaattggcccgaccgaggggtcattcgatttgacaattgtacgctttcatatcgaaaaggactcccagcggctttaaagggcatgtaagttcgcgcgaaaacaacccgtagggctgttttggcaggaagctgacggaatctcttcagaacattgactgttggcgcgaacgagcgtctaggggtcataggtcgcacaggcgagtcccttgatccgttacatgtgatgtccagttctgatgcgtctgggactcaggggcgggaaagtcatcgctcactgtggcactctaccgtctcgtcgagtaaggcattcctgctctcataaatatccctagaagtcgctaaatgagaacgagcagattgactacgggctccatcaagatcgacggaattgatatagcttccctcggcttaagacaattgcgatcgaaactcgccatcataccgcaggaccccaagatgtttgccgggtgggtggccggccttctatcatctgtcctcatggtgagctgactcacccacgtcttgtgattcagaacgatacggaattgcttggacccgtttgaggagtatgacgatgcgcggctgcacgacgcgatgcgacgcgcttcattgttgggtgccgatgacaccgactcgaagaggtcaactatggaaagcggtgggaaattcagtctcgaaacccgtctcgaggaagaggggctaaacctcagcgtgggagagaggtccctcatttccctcgcgagggcgcttgtaaaaaatgcaaagatcactgttcttgatgaagctacagcctgtgagtactatgtgcgaaatgccgaagcacagattaaatgctcaacgcgaatctcgatagccatcgaccttgtgactgatcaaatcatccaggaaacgatcaatcgcaactttgccgacacgactttgatctgcatcgcccatcgtctgcggaccatcatcgggtgggatcggatcgctgtgatggatgctggcgagattgttgagcttggaacgccaaaggaactattcgagcgggaagatggcatgtttcggtcgctgtgcgacaagagctcaattgatgccaaggagatagagaacgcgcaggcagagacctctcgtcagagagccaagtaaggtgatagccgcaagcggcccaagaactatcgtatgagcattcatatgtactcccaatttcgtcttgctcccgacacctcgttcggtacagctcaaattgcatttgcgccgctccctacagctcggcgacacagacgggatcggttttatagatattacgtacagaaaccaagggatatgagacaagagaccgctaacagaccgagactccacattgtcaaacagaatgtctgttccaaggagaatccgttatgcgacacaaggcagatgtgattcgcgttagtcaagaaccacgagaaagcgcgcacgatataagcgcaatcgagatcaggcgatcgtggttgatcgttaggagacaccaagcagtaacagtcccaaccctgacgattgatatcgtggaacagggtttgacgctgtgaacgtactcgaaagcaatcggttctcactccgacgtagcgaactatttatccagtaatgacgcgatatatggccgactctcgcttgagtctctccaccgaaagcccaccgaagtactcggcggctctggctcgggaagacctcgatgtcggatccgctcttcttcgtcacgagcctcttgcgatgatacctctggaaggcgagaagacgcaacggtgctgtcgatgtctcaagaggaagccggagagtgcggaaccaatattgtgcagtcgttgtagatgcgagagctactgtaccaacgcatgttagtcgttatcaagaccctccactcgaaacaccaagtggacttgagatgtccctcttcgcaggcaaagaccaggcatggggagaatatcattcgcgatcttgccagcatctacctgccattcattacgctttccaggccaagcaggtctcagcggcggacgctcatgcgggtctcctccttcttaagctagtcgctcttcactttcacgatcaatttccggatactcgggctaggcttctttccgcccagcatcttaatgcagggcaaattcgtgtcgttgatccatcttcggcgttctccagaatcagcctattcttcgaattgctaccccggcccctctcgaatggcgacaaagtggtcttggatgtcattgctagcaaagtcctggatctacctaaaacggccttagaattcctgctgtgtagattctcgggaaacaaccatgtcatatcggatgaaagactgaagcccatcggtcatgctatattgtacgtgtcaagacaagtggtatcaaatggaaatatagtctagatgatgctgatcgcgttacacgtagacctgaaatttcgagagcgtgcaatcactcttgtctaccgtcgggcgtcatctgtacctcttggaacccgtctaaggatcgtctggaggtcgacgtgcgcactctgagacctttgtcgacaggacaggaggtatgacttgtgtcgatcgattcagagatagagtctccctctaagtcttcacatacacagctcacagttccttacctggacccaattctgccacaccacgagcgacaagggtttctgcaggaacgctatggcttctcatgtacatgtccactctgtctcgcccaaacgccactggccacgccaacaagccatcctaccatccagcctcgccctgacgatcttactcgattgtttcagagggtcgtcggggttggaatcgcgagcggagtgagaacactgaagaccttcatgcctggactcacgtcgtcgccctcgcaatgggcgggatttcaagctccgttgccaagtcggatagcacaggaagcgatgccgactgcattatcaaattgcttgaaaccggatgtggtcagggaagtgacggcgatgttcgaagaagcagctgcggaggcggattggagggccgcttgcatggctggtatgcacgtacttgcgatatatacgacagtatacggctggcggcatcctctagtcggtaagtaactcgcgaacatggtctcggagcgcttgtagctgaccaggctcggttgttccgatcactaggcttacacttgctagagctggcgaaagtggtcttcaactctcacatgactacctcggcatcaagctctgaagttagggcaaccgagatgatgtatcagagtacaatctattgcgcatgggcacggtcgagcctggcatgctcggtcgcccagggcggtgtcctgagcggagacgacctgggtgtccagggtggtccaaggtcagaagcggaacagcttgatcaagcgatcaaggccgagtggcagtatatcatgaggacgtgagacaaatgattactcgcagcttccgatcatgacctgatgcctagatgaaacggtacttttctgttcatatcgcgcgactatctgaggcttcgcgtatttacgtacactacttccccgaaccatcgagacccgagccgtcccaaacgtcacaaggagtgatatgattcaggttacgatgacgagggtgaacagtatcagaacaatctctctacctatcatcccaagatgccatcagccgctcgccgacccgcctcgatgttgcctctgcttcgacaagcccggcccttttcctcctcctcggccattcgccaggccgttgctggtgtcgagcgtgtgccggccggaaccgttggaacgatacctgtcagacgaccagttggtgggttccgaggagggtaagttgcgctgtggcaatgaccgagtccttgcgagtatcagttgtactgacaccgaatatcgcgatcgtccttttaggctcctcggcttcgtgagcaatgcgcaaagcgcctgtaaagatgcaactggtctgaccgaatgatctgcatagttccttgggttctccatcgcttcggcatacgcttcgtactatctgttgcaggagtacaaattcgctagctctctgctccaatcgagtgtagaggagttgcaggagagcaccgccaaggcaggtcatgacgcccagacgccgatcggcaccttatgatctgaaagctgactgactctcttgtcctgctgcctgtccagatgaccaaccacctgcagcgaatccaagcggtagaaaaggaagtctcccgtctgagcggtgccaccgctgtcaaggaggaggttaccaagttgaggagcgagatgaagaagctctacgtaagcgcagccctcatctgttatcggagatctgtaacgaagcggcttatactctatctgatgtacaggatggggtccatgttgaaaatcttgacctacgagctcacgtttggggtattgagcaagacctacaaaggtcggctaagaacggtacgtcccatcgacagagatgctgaacgaagggcgacgagacgactaatgttgttggattgtctccgcacaaaagatgtcctgaagatctaaattggcgctcttgatcaacagaccgcgcatcaggacatcgtgtcatcaacgagtgtcccttcagtttgagtcgtgtaaaaagatttgacgatagccacgcgaaagatgcatagaatgaatcgatcgatatcgtctgaaccagaagcctacggagctcggcgcgtattgtgcggatatcggctgtcgaaagcttcgacagatcattctttttcagcccaccctttaatgtagcttcaagctcgattgaacgcgaacatccggatgctgttagttctgcaaggacgagatttgaggtggaccgcttgccgccaatatcatgggtatgcatctgtgtgtgccacggttatctgtgaggactaattcgagttcttcgaggtcggcttgtacaggcgaaagactggccatctgcactgtctcgttgttcaatgcggagcgagacaacttctgtctatacgagcttcctcgccttgacttgcatccagattctgtaaaaggtgaggatcgatgtcagccagcgaccaaccgaggtaggcgcgaaagtacggctcaccggtacatcttcaactgtcgtttccggttgacgagctatgaatgacggcaagttgagttttcgacccgcggcttgtccactcgaccgacaacgacgtaccattcttcgatcgacgcccagctgatcgatcctgaacaatggcatgggaggtagaccgagctcttcgtgcggcgtcctgaaaggattcccgatcgcggattcgggagccgtttcggtcccgtcctgtgccagggtaggagtctgctgcgtcgcgaactcggtacggggcagagttcccatctgaggaccaggcgtcctgaagcgcgtcgagagcggctcgatcgggttcaagcccgagcattctacgcggttcgtcctctcgacggacaaggcgagcttggacaacctttccgtctcgacctgcaaatcgtccggcccatgtcgatagatccggctgggtttcgtatctgacgattccgtgccaaagagaggggtttgcgaccggctatgggcatcgtccgtttcgaccacgggcgtagcagtccccgagtctgcaccctcggcttcgacctcgattttgggttccgcatcctccatgggcgtatacgcgtccttggcgccggtcaacatctcggacaattcagctgcagaatgatccagagatcagaacagcgtgcaacgagacgtggatcgagctagtaagctgtcgacacgagcctgacgtaccggcctcgaaaaagtagaccctagtcccatctccacggatgtaaaagttttcctccagcattctcccctttttgatcctcagctgggcgaggtcgtatctcccataatcgcgaatgaacaacagaccgttgggtttgagcatctgaagagcggagggactaagcgactctagccactggctacaggcttggtcgagaagctacccaccttgtaagcattggcgatagctcgttgccactccaaggggtgtagcgcagacatgacaaaaatcatgacggcgatatctaccgttcccggttggatcccttctggcaaggacgacgaggacgacgtttccgaatcgctcccgacctgttcaccgtccccggttgatagtataggaggggtcgacaggtcccatacggaagcgtgcaggatccccttgccatgatccggtacagggtacatcgggtttgcctgccgacagacaatcaggtcagtaaacatccagtacgacgtgtcatcatacgggccgtgaggacgggattcgactgaccttgacgacctcgacggcagaaggagcgtaatcgcacgcgtgaacgaccaggtccgggttctcgttcttggcgagcagggggaagaccgtattcccagctccctttatcgttgcgcgaaccccgattatcaagagcaggaccatcagcatctcgtattctcaatggacatgactttgggtgagaaaaactcacgcagccgatctcgacgaccaatttcggaccagcctgtcacatcaatcgggttcatgccgcagggccgcacgcatcagtcttccgctcacttagcagtgctgaagcttatgaatacttctttagactcacatcggctttggcacattcgagcagctcggggaattctaatcgcaaccaattccggtccttgaagaagctacgcgttcagacgcaagagagcgaaaggtgggagagacaaggaaaaactcggttgagatctgtatcgttcgtaaagtagggctgtaggaaggaaggaagagggggagtcgactcacgcggccttgttgatgtcatagaatcggttccagtacatagaaggcttcttgttgtaggcccctacatcacagcgatacattgatcatgatgagtagtgataacataggaatctatcaggtcagcatacttgcacgcttaagagctcccgtataaatcggcctgatggcaaggaccttgaacttacacttcatctcgtcgctgacctttccctccctctggatccctagagtctgtttcgcctggacctcccattctggtggaggcacgacatggtcccacgcgttgaaactgtagacgtcgtcagggttggtcagatagcgggacccaaacggcactcgacgtagtcggtcaacctcttcaggatcgagggtcgaggtaggaggttcggtactcggctcgtccgtcgcggtcgactgggaggtgacgggaggtgcgagctcgaccggagccgaggccgtggccgtggtagcctgatcagactggtcctggatttcgtcgtcggacatgtttgattgaacaacaagagatccctggcagtattaactttttcatggctatgcagcagaagatcaaatgttcaaggtcgaactttgacatcttttgattttccccgaacctgctctgacgatcggaagcaaataattacgttagacgcgggagaggatcggaagcaagttcagaaccggaagtaatttgagagtcacttgttctcgctcgtatctacacggatctcgaccttgtcatccttcaaaagtacaaacaacatgcaacacattcgtcgacgacccctttcaagacacagagccatcacatcgttctctcggtgaagctgatcgtccctgttgcttccattgtgaccctgtcatttgggtttatcgaccgaatccgtcgttccagctctcgactccgagtctgaaaccccccgggccccgcggcgagcagctccaccggtccaggtgatccattggctccgaatataccaagctaccagacacagagcaggtaccacactacttctcactcggccactgatcccaccgaacaaaacaaccgaacaaccaccaccaagacgacgacgataccggcgataacgataccaactccacttgttatcctgaacgggggaaattaccccgagaagggaaatcccacttcccacacccgtcacgatctgtcgccatcttcagctgatcacctcgcactcgcccgaggtctcaatcgtcaacatatctcatcggattggaatgcacgtctccaagatcgacaacgtcgtcctcgcgcccgaggtctccctcccaaacaagtcttcttcctcctcttcttcttcttcccctggtcctcgagcgcaagaccaccacctttcaagcgcccgccatcaatacctcttccatcccggtcaacctaaacaactgcaaccgggatcttcctctctccacccaacacgagggtcaggcccattgtccttgtcgacgaacgcgatggaccagccgtcattctcgtcgtccaagatggctacccagcgggtacaactcccaccgctctttcacccgaacggactccctcctcttccctctgggtcttcttcgagcaggatcagctcagtccaccacagcctgactactggctctaccagcatcgccactactcgcttcaaccgagattcttcgctagagctggatccgacgacctcgtttcacccggccgggaagggtcgaccgtccacccatccccgtcctaccgggcactatcatcccagccggaccgaaatggcctcctcgaccgacggaccctcgcgatccagcccacccagagccagacccaagacacagcctgggggaggtccaggacctcggacgaccgagatcagggctcgttcgacacgtacaacggtgaacgcgctagacgccggggtaaggagggggaaggtggacgaaggggaactgtcgtcggaccggagacgcaagagctcgacagtccttgtagatggtctcgatgtccgggatgtgagtcctcgcttgcgacctgcaccctctctcctctttccattcgctagataaagaagagcaagctgacgttccggatcgtcccgacctgatatgacacgcatatctgcagatcctgcaaacctatcgagcgctgcgggatcgtctgcccgacgtctttcccggaaaatcgtctgttccggcaacgtttggtgcgggcgagatagatttgaagcaggcgatgacgaccaagacggtacgagggcaacgcgacccgttacacactgtcgagccgagcgaatccatcgacgagctcgaagagcaagatgaggagacgggtgcggctgggtcggcgatcgacgagagggaagaattgagagagatcctgcggctcgccatggacgggttcaagctcgtcgggtccgtctttgcttacaagagccacagtgcaaggcaagccgagatgagacgacctgccactgagcccagtggtcttgggaggagatatgacgcaggccacggctccttttctcgagacaatggactcggaagtcgatctctcgagtgggacgatccgagcgagatgtccagcccgggcgggatgacgatcggggacacctcgacagtcaagggtcccgccagtggcttctccgcacagggtctgggcgtaccgtcgagctcggcttcaacgacaccggtctcccacatcgatcacacccccagcatcggcccgcaagacctaccgaaccgcgcaccctcgggttcgtcctcgcaatcgacaaagatggacgtcgatctgcccctctcgtccccactcgaagacgggttcggcgatcgaccaggctcctccgccgccaatggccaaggtgctgtcgctgcgaaccccgtctgcttggggtgtggggcgaccgaaacgcctgaatggaggagaggacccatgggtccaagaactctatgcaacgcatgcgggttggtgttcgccaagctggtgagctcgactttcgcaccgcctatcgaacgcgaaccgtattctgacgaggggacgcgtatctctttacattttcaggttcggaaacgagcaagagaagctgcaaaggctcaggcgatcgccaagggtttattgccgcccaagaaggcgcggggtggcaagaaggccaaagtgccggtcgtggtagaagagacgaacgcttaacctgatgttacacggcgtcgctttgtactgaaattgaggacgaacatcctataatctcgcttgagcaagctgtgtttctcatgaatagctgtatcggtcaattggtggcaagaagtggtatacaaacgagtgagactttctatcatgcatcagcgggcttgtaaggctgcatgagcatctacaggacgcaacggagacgaggccggcgtgagcactgcgcgatgccgacgagcttggtcgaccgggaaactcactttgctaaactccttcagcttctcgacccctcgcacttcttccgtcaaaagaggtagctggacgatgtggaacccatcgtcgtacagctcatgagcttcattcaagtacttttgctgcatcttgtgtcggacgccacactgctcgcagtttgagtctgagggaagtcatgggctgatcagcagagtccaatcagtggcggcaacgaaatcgcgcacccttcttggggaaaatcaactggttgacgacgatgttgtgcgtgtcaatctcgtattgcgtgagctcttgaatcagtcgctctgtttcgtagagcgacaggaattccgaaatgcaaacgcagatgaaagtggtcttgtcctgtcgggtggatgggggtcagcaaacagcagccaaagatgcatgcaaggtggctgactacatacaggatccttgaattgagtattgacctcggtgatgatggctctcatcgagtcaagtttggcaaacatgtcctcctgagctccaccaccaagcatggagctcatctacaagccgacgtcgacgcgttgatcagcaggatggccctgattgtgacagatgaagcgcactgacctgctggatcatgggtccaaacttgccacccaaggcactaagtttgccgagagccttctctaacacagaggggaacgagaggaaacgaagggtatgaccggtaggagcagtgtcaaagacgatgcacgagaattccatcgactgtacgtgcctatacataacaggtctgtaagacaaacgccaactgcagatacttggtcatgactcacttcatgatctcggcgaatcccatggcctcatcgacaccgggaatggcgaaagcaaggtcctgcatcattccgcccataccgccaccttgcgagtcggctggatgggataaagaaaggtgatcaaattccaagctcgagagctacctggcgaatggcaacgcgtcactcacaagcctcgaccatctcctggatgctggagttggggtcaatttccatggcaaacaggttggtaaacccattgacaagtgtcgcatctttgccgaacttttgcccgaaagcgtcagacagattgtgggcagggtcggtagactataacaatgagaaaaagaaaagagataagatgcctgccaaggcagcatggatttcagtcgaaagcatcaacaaccggcttacgatcaagaggaccgattctcgacaggcggcgagctggacggcaagggaacacgaagtggttgttttacctatgatcgacgacagtcagatcggacggcctttatctggttcacaagagccacgacgtaccgactccaccctttccacctgaacattgatctcaagatgtcagctaaacggtctctctcaagcgaaaacggtggctttgctcaccacaaaagatccactttaggctcttctgatccagcacgttctgcaaggtcgggtcaagcgtctcaaattcgtccatatttgtgtgttttgaatgaaatcagtggggtcatgttgtaggagaatcgcaacgagtcgatcatgttcgaaggtctgaattgcagtggtgggtagacctctaggccttggtgctggtatcgtgctaggttgcgggagcaaagacagactgacgcgggggaatactagcgattacgcgcctcgtcgatcggccatgccagaatatgccagccagaccggtaacaatccaagtacaggggtactggctatgtacagtacggctgctcaaaacggtattacgtctctcgagccactgacgtgatataccgagcagggtcgttggcgtaaaatcgtgactcaaaaagaggcaaaaaaacatctttctattacacttttcatacagccttgtaatcgatggcagactcgtgcttcttggcttcggcgacctttcggacggccttcatcaaatcgtcttgtacaatgtagtccctgtgatcgcacaaaagccgtcagctccatataccatcttcagtcgcgttgtatacgagctcacctgtcttctctgatggcaaacattccagcctccgtacatacgtttcggaggtcggctccgttgaaggtgtccgaaagctgcatcgagagtgtcgtttgttgttaagcctaagcaacgtcgtgacgcatctggtcaaactcaccttcactacggcctcgtaatcaaactctccactcttattgatgcttgcagcgtggatcttcaagatctcgagacgtccctgttcgttggggagaggaatctcgattttcctgtccaatcgacccggtcgaagcagagccggatccaaggtatccggtcggttggtggccatgataatcttggtcctgcctaacgtgtcgaaaccgtccatctggttcaagagctgaggttgtgacgttttccttcagtctcgatatatcagtgacatgcttcaagtttaaaacttacctccatcagtgttctctgaatctctcggtcagcactggttccctcgctgaatcttcgacctccgatggcatcgatctcgtccatgaaaatgacacacggctcgtgctccttggcataggcgaacatttctcggatcatccttgccgattctccaatgtacttgtcgacgatctgttacgcacacaggatcatttccgcatgtcaggagaacatgccacaggtactagttgcttacggaagtcgacttacggcactactgacaaccttcaaaaagttggtattgagagtggcggcaactgctcgggcgagcaaggtctttcctgttccaggaggtccgtacagcaagactcctttgggcgggctgattccaactcgctacatgagtaaaacgccggataagatcagtttgagccataattcgattcgatgtacgtgcgaaacctgcgtacctcgaaaagctctgggttcatcagaggcaactcgatgacctccctcaactctcgaacctgatcgttcaaccccccgataccagcaaaagaagccgaacctggatcctccaaggacatgttgtagacctggtagtacacagaagcatcaatcaggcgtgtatcttgtgggccctgacttcacacgtctactcaccatggggtcgacttctcgcgggagaatccgcatgatggtcaatgtagtcatgtcgagcgatacccgaactcccgccttaagctgagtattattacagatacatcaatgggcatcagcgcgagccaaatcgtttacagctggagaagactgaccttggcgacgggcaacgttggcctgtatgatacgatatatcgaggaccagacgaggctttgacgatgactgcagcggtagtaggcgcggtcagccttggtaatgggatatagaatcgaggccgagcatcgacggctcacatcgctcatcatccaattgcttcaggacctctccgatgatctgaccgacactttgaatagccttgagatcctcctccgactggtcgtacgctttttgctgatcacggatgttcaaacggactgtagtaacccaagattgattaataaagcgatcctagcgtgactttacgaatcctgaacgcactcttcttcaggttctccccgatctgctcatgctccttgattttctgtagtgatagtcccgcataagacgccataaggctagcaaaacactaagcagcccatactcactgctcggtaagccttgatcgcctcgatcttgggtgcttccagtgcgggagccgactgagcggtagatgattcaccggcagacatgatgcttgtaggtgattggaattctagtctcacttcttaccaagtcagagaatggcttgaaacacagttcgctgttagttatatggaacggggttttatatacagttgtgacaccatcgtgaacccgttattcgtcacagatcacagattcgactaagacacctgcgtcagcgtgagttccctcgagtcttgacccgagactagacgcgaacctcgcgaatggccctggcacacacgtccgtccagcaagaccacgctcaccccctcttgcaccatgacgcatacaaggaatgtacacttggtcaaacaatcatccctaccgtgcgacatagcctcaaggctactcaaactaggtcaaggctggctcttatcccaactcatagatagcctgaccgacacatccccttggaaagaaatctaacttcgtcataatcgcgtcccgaacatggcggacatcaagcctatcaccgtgagtagctatgctactgatgtgtagtgcagtcgaaacgagggagctcaccaaatctacatactttactcttgtagttctccgagcatcttcaggtcagtacctcgtattatacgcttcttcgacccggaggctgactctaccgattgttatctccattatagcttacggctgttggtgttcaacccgaggcgatcgctcatgctacctgtactatggaatcagaccactacatctgcatgtgagttggcaggccttctcccttatgaaactgcacttggctcatcgcctttcttcgtctaaaagtcgagaaaaggtcaatgatcagaatcaggtcgtgattgtggatctagcggacgcgaacaatgtcttgcgaagacccagtaagcacagattgacagattcgcaaaagtaatagcttagctgacccacatgacacttagtcacggccgactcggccatcatgcatccttcccaaaaggtcatcgcgctcaagtgtacgtgcttacacacgcgatgatgcacatcgatgctaccagcctggaatgctgaccttgcctatcgatcaactctcagctggacgaacgctccagacgttcaacctcgcaaccaaacaaaagctgtcgtcatacatgaccgacgaggacgtcgtctactggaagtggatcaacgacactcagattggtctcgttatggatcgcagtgtcgcccactgggacgctatgggaggtggttccgctcctaccaaggtcttcgaccgacacgccactctcgagggagctcagatcatcaactaccgggcttcaggtgacggccagtggctcgtcctggtcggtattttgcccgacaataccccgggtgcattccgaatcaagggagctatgcagctctactctgtcgctcgacgtgtctctcaacccatcgaaggtcatgctgccgccttctctacgatcaggctggagaacgcgcccgaagacacgaatttgttctcgttcgccgtccgaaccgcgactggcgccaaggtacgtactcgctttgcgtcattcgcaccggcgagcttcagcttatcctttcctcgctcttgtcgtcgaccagctgcacatcgtcgagatcgaccacaatgcggccaacccggtcttccagaaaaaggccactgacgtctttttccctaccgaagctgtcaacgacttccccgttgcgatgcagatctcgaaacggcacggaatcatctacctcgttaccaagtacggcttcatccacctgtacgacttggagactggcaagtgtctgtacatgaaccgtatctcgggagacaccatctttgctactgcagagtacgaattgaccggtggtatcatcggagtcaacaagaaaggtcaagtcttgagcgttagcttggatgagcccaacgttgtgccttacatcatgagtacgtatctccaatttgcagacggacctgatgtcgcattctgatcaataccaaccactagaccaactgaaggacggaaacttggccatccgtttggcttcgcgagccaatttgccgggtgcagatgaacttttcgttcagcaattccagaacctcttccaacaaggtcaatacagcgaggctgccaaggtcgcggccaactcgccccgcggcatcttgcgaacgcccgagaccatcgagcgtttcaagcaagtgccagtcgctcagggtaccgtttcgcccatcctgcaatacttcggtatcctgctcaacggcggagacctcaacaagcacgaaactttggaattggcgaagcctgtcttgttgcaaggcaagaaggaactgctcgagcgctggttgaaggagaacaaggtgagtagcatgagctgagtcagactacaagtgcaggactgattcttccatttcgtcctttacagctcaactgcagcgaggagcttggggatctagtcaagcaaaacggggacaacaacctcgcgctctccatctacctccgtgcacatgtgcctaataaggtggttgcctgcttcgccgaggctggccaattcgacaagattttgttgtactccaagaaggtggactaccagcctgattgggcggtgctcctgaggcacatcgttcgggtcaacccggacaaatcggccgagctggccacacagctggtcaacgatccttcgggacctcttgttgacatcaatgccgtgagtgtctccatgggcgacttggtcatacgagatgtcagtctaacaacctctctccttcgccttacaggttgtcgatatcttcatgtcgcagaacctgattcagcagacgacttcgttcttgctggaagcactcaaggagaacaagcccgagcaaggcggtctccagactcgtttgctcgagatgaacttgatgcacgcgcctcaggtcgcagacgccatccttggtaacgagatgttcaccaactacgaccgacctcgcattgccaacctttgcgaaaaggccggtctgatgcaacgcgtaagctagatccgacctctaacccgcctgccttcacagtcctgactgacctcgactcatctacaggctctcgagcactacgaagacaccgatgacatcaagcgtgttgttgtccacagcaacctgttcaacgccgacgtaggtttgagcacggaattgctgatcatagccagcttgctgactccttgactcttctagtggcttgtggcctactttggcaaactcactgtcgagcaatccttggcctgcatgaacgaaatgttgaaggtcaacatgaggcagaacctacaggttgtggttcagatcgctacgaaatactcggacctcctcggacctgtcaagttgatcgagatgttcgagcagtacaagacattcgacggtaagtcaagccgacttgaccgcttgactaggcagggcgctcaaagcgtattttataggactatactactaccttggctccgttgtcaacctcagcgaagaccccgaggtcaacttcaagtacattcaagctgcgactcgaaccggtcagatccgagaggtcgagcgtatctgccgagagagcaaccactacaacccggagaaggtcaagaacttcctgaaggaagccaagatgtcagatcagcttccccttatcatcgtttgtgatcgtttcaacatggtccacgacttggtgctgtacctctaccagaacaatctcaccaactttatcgaggtttatgttcaacaagtcaactctgcaaggacccctcaggttgttggaggtctactagacgtcgactgcgaggagacgactatcaagaacctcttgaactcggtgaccggatctttccctatcgatgagctagtcgacgaagtcgaaaagcgaaaccgtctcaagttgatcctaccgtggttggagtcgcgtatccagcaaggtcagactgaccccgccatttacaacgctgtggccaagattgcaatcgattcgaacaacaaccccgaggctttcctaaaggagaacaacgtgagcttgatcgtttcattagtgcttgcctgtagcatttcactcaagcaagatatcattcgcagatctacgaacctctcgtcgttggaaagtattgcgagaagcgcgacccttacctcgcttacatcgcctacgccaaggggctctgcgacgatgaacttgtccagatcaccaacgagaaccagatgtacaagcaccaggcccgttacctcgtcaagagaagagagctcgaactctggaaccaggttcttctgccagacagcattcatcgacgtgctctagtcgatcaagtcgtggctgtcgctgtgcctgagagcaccagtgcagatgatgtgtccgtgactgtcaaggccttcatgcagaacgatctgcccgtccagctcatcgaacttttggagaagatcatcattgagccttcgccattcagcgacaacaagagcttgaagaacctccttttcctcactgccatccgttcggacaagggcaaggttatgagctacatcaaccgcttggatggatatgacgtggacgagatcgcacgaattgcaaccgaggctggcctgcacgaggaagcgttcaccatcttctcgaagcacgagaagcatgccgaagctatgaacgtcttggtcgaccacgttgtcagcattgaccgaggctacgcttatgccaacaagatcaacaagcctgaagtctggagccgattggccaaggctcagcttgacggacttcgagtcaaggaagccattggtacgatctcttttacctgatagtgccttttcgcggttgttgatcatcttgcgtatacttgattcgaccagattcgtacattaaggcggacgatccttccaacttcgaagaggtcatcgagatcgctaaccgtgcggggaaacacgaggacctcgtgcgattcctgcaaatggccaggaagagcgctcgggagcccaaggtcgataccgaattggcgtatgcttatgccaagacggaccgactacatgacatggaagaattcctctcgatgaccaatgttgcggacattctgcaagtgggagaaaagtgcttcaacgacgagttgtaccaagccgccaagctcctcttcacgagcatttccaactgggcgcgactggctacaacccttatctacctgggcgagaaccagcctgccgttgatgcggccaggaaggccggaaacactcagtcagtgggcgaacaacagacaacggaagccagatgctgagtttcatgtctgttttcgtgatagggtttggaagcaggtcaacgccgcttgtgttgacaagcaagaattccgcttggctcaaatctgcggtctgcacttggtcgtaggttccagtcgagcccgtacacccggtccctcgtgcgctgacctctctcgcctgctcaaaggtgcatgccgaggaattgcaagccttgctcaagttgtacgagaagaatggctacttcgatgaggtcatttcgctgttggagtctggcttgggtaagccgaaaagagtcggtcgacctgaatgaagtgcgagctaagatcattgtgtatttctagggttggagcgtgctcacatgggcatgttcagtgagtagtgtctgagcaactctgaatgaaacccggctaatggcgatcttcccctcgtagccgagctgagtgtactttacgccaagtaccgccccgagaagcgtgagttccggtcggtaacagtacgcgtatgcagcgtagctgaagttcacccgatagtcatggagcacttgaagctattctatggtcgaatcaacatccccaaggtcatcaaggcggccgagcaggctcatctttggcccgaacttgtcttcctctatgtcaaatacggtaagcgtgtactaaatcagatgtgcaacgaaacaagaggctcatcaccgctgccgcaacagacgaatacgacaatgcagctctcgcgatgatggagcgcgcagcggatgcctgggagcacaaccaattcaaagaggtcgtcgtcaaggtggccaacgtggagatctactacaaggtacgttgctgtttgcaatctcgagaggatttgcaacattgacacctcaccccatcgttctaggccttgagcttctacctgcagcagcagccaactttgatcacggatctgctgaccgtcctggctttgcgtgttgatcacactcgggttgtcaaaatgttctccaccgaggacaacgacaacgttcccctcatcaagtcgtatttgatcgccgtccagcagcgcaacatcgaagccgtcaatgatgcattcaatgacctactcatcgaggaagaggactacaagactcttcgggattctattgacagcttcgataacttcgacaacctgaagttggcgagacgtctggagaagcatgaattgctcgagttccgccgactggcagctcatctttacaaggtaagaacatctcgagatctccttgttacgctctcatgtattgaattcctgaactggacatagaaaaacgccaagtgggaggaatccatctccatgtcaaagcaagacaagctctacaaggatgctatggagacagctgcagtttccaacgagactgcggttgctgaggagcttctgtcctacttcgtcgacatcggcaataaggactgtttcgcagccatgctctacgtctgcttcgatctgttgcgacctgatgttgtcgcagaactggtaagacttgagcaggtcccgtcatctatatgaccattactgaaagtcatcgatcgtgtttggtagtcctggaggcatggtctgaacgactttaccttcccgtacactttgcaaagccaaagggaccagctcaacaaggtaagctctccgccatgtgcgctcttgaacgccatcctgacactttatttaacccgggtcgtagctcgtcgctctcgagaaagaattgaaagagctgaagaccaaaaccgtaacgaaggaggagcaagaggattctcaacctatcatgggtcccggctttggctcgaggctaatgttgacacaaggtcaaacggggggcatggccaacggtggaatgatgatgaacgggggaatgatgcctcagccaacaggtttctattaggagcacgaccgtcgcgagtaaaagggcttagaggttaggcgataacgaccccaatgagttttgatttccctgtttttggttctgtattacgtgatatacaaagttgtgtttgccacgatatatcgtagcttgtctcgtacacgccaaagggctgcaatactgtcgtcgcttgtcatttctcatcgttaccgtcatggagagtatcgtcggggggcatcatcactgtttgagtgattcgtatgtcttgagcgcgtcgtgaatcatgttggagctgttccggtcatcgaccactatttccaagtccttgcccgcagtgggtgccaatcgctgttgcaatcccttcgtcaagtggagctggaatttctcgtatgtgctccggaactcctggatgttgttgattagtaaatcgatcttgctttgcttgtcctgttcgccgagagcgcaaagcaattgcgttgcagcggacggcttcccatcgaccatgttcgcgaacagcaacgcgaggtacccgcttaggaactccgctccggcctgcagaggcaatcaggtcgtcagtatagagctgaagagccggagaactggtactcacgtcttcagccttgtgcgcctgttgattgaggaacacttgcaccagctgatcgattgcaggacgtttccctggacagtgacacccttcaacgcatttacgtgaaccggaacacgccttgccaatcgctgcgaataatcgttgcttcagcacagccttttcgatcgaccgaaacctgacgactgacccaacgctaacatgacttggccgtggtctggatcctcctgcacgagattgaaaagacagccaagagcaaggtttgtgatttccgtctcgtcggccagcacatcctccttccagctcgtgacagtcgtatcactgcggcgtgacgacacgtcgcccatcgccagactatcgtccaccttgacacccaagagcagtcgaaggagcgcgacgtagggcgccgtgccttgcaatagagctgacgaccacgcggggctatcctgcgtcaaggccaacaagagcttgagggtttgacttgttaattctgttgaatccgggcgtcagtcaatgagggcacatggagacctgcagcgaggacgactcgccttcgacttgcgacgttgaaagagtcggaatcaagttgtcgagagaaattagcagtaataaatcggacaaaagaggcgccagagcgacatggttgtcctgtaagacgagcttgcactccgagctttccgtaatgagcatctgaacaagctggatcgaatcgaagaccgcaatgaagtcgggttgttgatctgccgtgaacatttcctggggtggttagggaagatgccatcagcagttgacgtctgctatgcgataggactgtgacccaccaagcctttcttataaagctcgagacgatgcggcaagatgccaagctcctgctggatggcggatgtcatcacgacgacaacctcactagtatctacgagattggatgggtccatccctcgctcaacggcgtgtcccagaaccaccgagaagataccacatgccattcccaacggagatctctgtggatgaaaacatgcttgttgagttcgtgtgtccgccgaggccttgtggcttacgtacagcttcttcggtcaatcccggagcaattaggtcgcttcggacagccctcagcaagtccatctgctcgccatttgatggatcagccaggtcgaaaagtcgaaatttgcgcttgtaacgacttacacttggattcttctttcggcggctggaagctgactgtaccagagagatgcgcctctcttggatagtattggccaggaatttgcagatctctcttgcgtggccttgtatgacggtattcagatcgctcaaagacctcgacagatgtgccagataaagcaacaatacgagatcgagcgcctgtcgcccaaacggtcaacaggttccttggagggacacgagatttgaaagcccaacatacctcatccgaccggtccttgccggcttttgcaaagtcctcgtagatagattcgatctggccacagacacggagcctctcgaaccaagctgcatctgcgcatttgctcaatatatcgatcgcgctgacgtcatgcaggagcggggacgggttagatactgttcgagaacgtctgcgggcgtggctgaggacttgcctacttctcctggaggccagactatcgccctgaacgccgtctcgcaggtagcctaattcgtccataaaccgtctgttctcgcctctcgatcgtaagtctgccagactaggaggagctttcagatcctagccaagtcggagaggatccgccattcagcaattagatttcgattcggcagatgaaactcggtctcgactcacccccatggatccttgagaatccgggttccagtcatcctcgtccgccacgtccacaccgtatctcttgtttagttcggcatagctgtcttcttgcacgggcacggctctatcgccgagcggcttgaagatgctgtgcgcttgaggtggagagagcaagaacccgttgatctcgttctctagaccgtccgatggcgggtcggagaagaccgtctccttgttcaacgaggatctcggctgctgcgcggccttgttcgaggttgactgcgcggcaacatcgtcggacgacgcttggcgtcttccataagtccggatcgctcgacctggaccgccagccgaagcgcctatcagaccggttagagccgcacctgaactgagagaatgcctcagtacaggttttccagagggagactcgggtagagacgatgtgcggcccagcccggcctgacgtcggggaggtgaaggtgtcttgggatctcgtgccgaaggggacacatgtgagaagcttcgtcctagctgtcgaggcgtcgtagggctctctccggctgggctactgggaccacttccagatccgggtagcttgaggtgcggtctttcgggactggagagttcccacgaatcgattatcggcagagggaagtcctcgtcctcgtcccccttctttccacggtggcccgagaagagctcgtcctgctccccgagcgattccgtacgtgtcatcatcttccttcgacctttccgcaaagggcccggtcgggtcaccgcaaaaggacccccagagatatcttggatgtcggcccgagacgaatggtctagtctcagggcatctcctgggatcggttcaccaggttgtttcctaccctctggtgacgggctcggttttcgtaggaaaagatccgtgagatctcttggaggagtcctcggcgtatgtgcagcctgacgagcacgcaacgaggctgcaccttcgaggtccggcggcgtagagaggggaacgaggtcgttgatcgggatcggtctgaagctgtacgccgagctcgaggggatagggatgggaccggaactattatcggtctcatcgacaagacgccctcgctttgttgattggctgttcgcttgctttgtgagatctgccatggatggcggtcgagcccttttgagactgggtcgtagcgaggccaaacgaccctcgactttgccagtccctagtgaggcgacattgccctgctcggaggcagcaaccataccatcgaattcttgctcatcttgctgtcttccgatcccaatcatagagggcgcccgcgtgctggtttcgtgaaccaacgtgtctccttgcatctcgacgtcgtccgtaactgaagacgggggaggtgaagtaagaggagaggtggaaggttctcgttgatatgcttgtccagcacggtccgtcgagccagcttgagctgttctatatcgtcttccgtatgtcttgttggaaagtcggcgacggctaaagtctggagaaggtggtggttgatgcgacatgacggagcgatggccggctatgtatatgacttcaagctggcgaccgctggcttctcgggaagcggcggggtgttcaagaaggctgctttccgattgtccttgttctctttccgatcgaagaggctgttattcgtgttctctttgtttgtatatgatcgtcgttgacatggtcgagtagtactgtgtaactaactagctactctagttacctgtcgttactgtcatttgattgtttagtgaccttctcgcttctcgcttctcgcttctcgtgactaacgaggcaaagggcgacgatacgcgatacgggttacagtagttacagtaaccagatgccagatgattaccaccactactagacaagctgaccattcatgcaggcagagccaacaccttgtacaacgaccagattattaatctggctcttagcttcccagggccatcatcgtatgtgatcaagaattgacgagaatcggtgaacttccttctcaaattgtattacacaacaattcatccgatcggactctatcatcaaacgtcatcagcgatccttccccgccccatttcatcaaccggtccgtctagaccctgtcggctcgctcaacgatgccacctctcgccgttcgaggagcagtcagatcgacactcaaaccacccatccctaaagcccaggcctggatcaaccaattcccaacgacaacctcgagaccgctgctcaacctctctcagggcgtacctggcgaggcacccgaggcgatctttacggaaaaggtttccgagctctcgaagcagcgggaacccgccaactatgggtcgattcagggtgacgatgggttgcgggcagccgtcaaagaggagatgagggacgtttatcgatggaacgaggccggcgcgaaaggcgtgggcgtgacccaggatcaaatcgccatatcatcgggatgcaaccaggcgttctatctgacgatgagtacgctgtgtgccgagggggacgaggtcatcatcccttgtccatgggtgagcttactcgaactccgatgacacgtccagccagatttactgattgcactcggctttgcgagattatagtatttcaacatgttgatgacattccagctcttgcaactcaagccggtacccctgccattgtctccctcgaatggcttcagaccgaccgtgcaagaagcgaaatcactcatcacgccccgaacccgcgcgatcgctctggtcacccccaacaacccatgcgggaccatctacccgccagagctcatctcgtcgttctatcacctcgccagggactctggtatcgctctgatcgtcgacgaaacttaccgggatttcgtgcctccttccgatgagccaggtgcgggtgagcgcgggaaaccgcacggtctgttcgacgagcccgattgggatgagacgctcgtcagccttttcagctttagcaagagctacaagatcccggggtatcgactcggagggatcgtagcgagtcgaacggtgttggaagcttgtcggaccgtggcggattgcatccaggtgggtcgggcgggattgacctgaggaggtcaaaacagtagaccaccgcctgagctgactcaataacgcgcggcttcaccggggatgatgcgtagatctgtccgcctcggatccctcagctcgctctggccgagctcttgcccgctttacggccttccttggtatctacctcaaaggcgttggcctcccgcttgcgacgtttcgaggacaagatcgccacggtcccaggttggtcggtcgtctcttccgggggttacttttcctacgtcaaattcccggatcgatacggtccggacgtcacttcagaacaagtggccgagaggatggccaaggagtgtggtgtactgacgcttcctggagcttggttcatgccagaaaggcatgacgaaggctggaaagacctcgagaggatgggaagcgagctcgtcgaggacagatggctgaggtgagtagaggctgctcgacagtcgtccatccgacgagaggtggctgaacgctccctcgggtcgtctagattcgccatcgccaacgtgtcggatgaaaccgtcgatcaaattcccgagcgtttggagcagctcaaccagttgtattcataagaatagaagaacgctggaagcgtcgctgttggccgtttgttcttccccggaagcataacgaacacctagaggccgactgttctgaccgtagagctacgcgcaatacgtatgcctggctcctgatgaattccaccgccttgcatgaaccgatcggtgacaaatgagtaacaaataatcatctcgagtcgttccaagaaagttcggttcacctgattcggatccgcgcgtctacggcatttgcctgtctctccctttttccgcgcacgcaccggaagcactcgctgacaaaggaggccagtgacgtcgcgttttgctcgatcgcaccccttcaacggaagcaaagaaagcgaaccttttgcttctttctttctttctttctttctttcgagcgagcgagcgatcgacggtaatatcgaccgtcttctaaacgatttcgccgagcataaaaaatgcccgatcatactccgcccgtccatgccgaagagtgtccgagctgaaactcttgcacggcatcaggcagggaagtcgtcgagatcagcctgtcccatcggtttcgtcgagctcaacatcggtcctttctgtagatcaatgtcgacgaaatggcactacttagtccactgtcggtagaaccttcagtcctgtatttcgaggttctgtccattgggtaaggaggacatgtgagaagtggctgcccagtcagactgtgtatgctgcaatatagcgtagcatcaagtatacacacttggaagtcggtatgtttgttacacatgtgagaatcatttgcgtttcaggactagtggatgcagatcatcgcattacatgcggatacaggcatgatctacgacactcaacgccttgagccgagcctccgtgtctaatctgaaacgttccgtagcgcgatattatcttcgcgcctgctatcgcaaaaggtataaagttgcgaccctgccggagcgccgccggtcgggacgatcagcgagatgggaagcggaactctagatgccagtaaagtcgagctcgcatccgctggaatgagacgacggccgtgtcaagcggacgcaagtcgtcgaacgcagtttcgtcgaaccggtgcgaaactctgaaagaccgtctccaaatggttctttgccgtgcgacaggctttattcatagccgggatgcactaaggccgaggcgtctcacgagacccgtctcgtgctgaacggtgtgcaaactccaggcggaccaagcgcatgagtcaagttgtacacaaccagtgtcttgcttgtagcggagtattggcccgaccatgagaaccgcgtgtaccgagtcgggcggaactccacttatacgggagtgtgatacatgagtatgtcctcaacgttgatcgtcgatttggccgatcgccgataggcagccgccaaagcgctcctgacttcgtccctcagagctacgttgcgtgtctttgcgttcgctttggtgggatactgccccaaggcgcggtgacgctggtactctgcatcatcttcgaaagggatcctcttgacagcaggtgaaggcttgcccaaatcatcgatatgcttagtgtatatgtgaagcaagtcagcacgcgcgctcttatggacgttatcggttcattgaactgactgtacattttgaaaattgtagtcggctcgggatcgtcttcgagtatggccgtcgagaaggtaatgatgacactccgccatgcgccaggccgacttaccgatagcatctttttgtgcaccatccaggttatgcggtgtatccgacactagcgaccgtgtcggcttgatctggacctaatttgaggaaggtatttgctggtttttcgatctgatcgcagcattgagcagcgtacctccccaccaagcaccttttcttgtacagcattgcgtcgcgatcagtacgggacactcccagtcaagcatgctgaagcgacattgctcgcgaatttactttatgagcggaaactcgaaaaccacatatgagttattcaacgttacatcggttttctccccccaagcgaagggacaacatttctgtgaagtggatcagcaacgaagtctcagcgtctagacaaacaccagctggttgtccttgcgtagaaatcagtgtaagcttgcctcagacggtgctggaagacgtatcgtaggggttgtttcgatactttgagggttgcgagtttctttgtgcgagggcttcgcgtgtttgcgcctcgtgagaggagagagcagcttacccaacattcaccctcagaataccggcaaagacccgcatgattatcccggcattatcacaaacgcagaaattgacgcgttctgcttcccatcgatcgccggtaagaaattggagattaattgcactcacagataacgttgcgtagatgtcccatagtgaccatcatcacatctggtcgccaggtcgaccgctggacataccgttctcggtttcgagaaatcattacgtgatctgggtttgcgcagtggatcaagccgacttgtgcctttattggtcgacgcaggtttctgcagctgcacccaaggaacaggcatatacgcaacctgtttggttctgctaacacactaatgggatggctggcgcagtttagcttctcgatgtgaactcacatgacctcataatgacaggtggcgcggcatatgggggaacattctaaagctgatgctagctcttcctagcctgccggcagcaactcgcgcagactcgggaagcgaagcgagacccttggcccggtcatggacgcgtgtggcgagttcgggcatcgcatccagccttgaattgcagcggagagaagtaggcaactcagagtgaaggaatcccacgaggagcagacggaaaattgccgtaccgggctggccgtggtgacctcctttgacaatccgagtccacatggtgtgcgtagcgaccaaagtaggagccactgtacttccgcgaatttgctctcatttttcggttgtgcccgaagcgatagggcctaggggtatcaagctccaaacgtcttgcaaatgtgagagaacgttgcatatacgtcacgaccgggtcggcaaacggagtaggaaagatacgccttacccgcgttcagcgtggaaaagccgagtttagcgcagatgtggtgttcggaagtcggatgcgattttcagggtgtaaaggttgtcgatatttgctattgtgtccgacgcagaagatcaacccagctatgatgcgggtaacttctgcctcccgagtgtcagtccaccacactactgttttcgagattctcgcggacatagtcgcgttcgaacgaaatcttcgaggttgacttggcctagacaccaatccgccgtgcagcttcgtcattgcttacgacgcatagtacgcgcatgaagtatctcgtctggctgagaacgcctgcgtaccagttaatccggtgttccgcgctgccctggggcgctggcagataactttccgggtgatcagaagttgcaccctcggagctggaatatacctccgttatgggctagcgtgagttcacagctaccaaaagaaaattaccccgagacctgcatttcttcgatcgcgggtcataaggctcggaatcgaaactgaattccgcacagactttcggaagttttgtattacgctgacagaggttgggagccgagtcttcgaggacaagcgtacaagttccggagcggatcagcatatgcagcgtatgcaggtagggtaatcatcttccagtccgatcacactcgacgccaagaagacaaggaaggttaccagccgagtgcaatcggtgactggcgagcacgcaagcgttgaccgaattattctggtgagttgctcatacgccgcgcagctttgtattcgccgaaagaaaagtccgggcaccccttctatgtgcccagtccagccggagcaatcacaaatttgccggtgaattagactccctcaaattaagcccaaagcaccctgtgccgaggagctcacgcgatttccgatatccgaaacatttctgtgccgtaaggcaatagaacaaaatgtgactacccaaggcgcgtgcacaatccaattacgtgagcggtgaagggaattgataccgttcccaccagcgcatgagagcagcgtccgggtgcagaagaaagccgcggacgcgggaaaagaatggaagaattgcatgcgcgccgatgagttcaatttggccgtgtggtttcctcgccgagccgaatgagaaggcggcggtcgaccggccttcgcttcggcctccgcctagacccaaggctcggaggtaataccgaaaggtctcatttcccttcggtcgtgatcgagtgggtcagtgcgtcgctgcgcaccttcgggtcgacttttgatccccagacactcgtagagtccatcacgctcggatgtgattctgacccggttgcctatggattacgtccgcgatcacctacggatcggtctgaattcatgcaaggagagccgtgcagatagatgcgaggtatatagtctcgagtgcaaaaggattaattcgagtcgggaactggcttcttcttcccgtcccggagagcccgtctacgcaatcgtgcttcccgctactcactcaacatcaatcaatcgtatcccgcacttgacctcgtcgtccatcgtctactcttgtggatcatcgacactgtcactaccaatcttcactcacggtcctaccaacctcgatcaatcctccgcatcgtaacttacctcggacatctccctgggtgacgcgcgaacgtgagtgtgcctgaaaaccaaggacggatgactgtacactagggaggggcgagacgatatgtttcaaaagagacctctcttgttctccccttctgtgtactggcatccgtacaagaaactctttttcgaaagccgtacgctgatccgtttcgtgttcttcttttccatcttgcatggactcatgactacatgcacccacgcgctgctttccatcaatctctttacgcacgccaccgtgatcactcctcgcgacccatcgtaatcacggcgacttttgatattctccgtgatatgatgtgatcactttcgatcgctcctcaccacacataacctccgacactattctccgacccggatactcgatctcatcacagatcgcaagggaaaacaagtacaaatatctctcgactcttgtcaagatcatattcatcgtactccgccaccccatcactgcaacacctcccacccactcatatcgataccaatagtcaatatataattcaccatgatggctccttcgtatcacccttacccctcgacaccggttgtccatcaaccctactacatcaccactcctcatcattcgacggcacacgcaatctcatcaccagcggcgcccatgatcccatcggctccttctttcgcctctgtgccctctcatggatttccttccgtctactctcccacgtcttctcaaaccgcgttcttcccccaacccaacgacggataccagagtttcaacccctcgccgccctacaccgggcacgggcaagccaagtctatgccatcaaacggtttgcctactgacatgagggcgctgccacacgccggcgagtacaccagcttcgcgcctagtacctcgcctggcagtagtcggcgatccgaactgcctatcggccgtcgtcagagagtcactatggcttgcacttactgcaggagaaggtgagtcgcgattcgcgagcgggcttgaccgccaactcatgctgattgtcctctgctcatgatcaggaaaattcgatgcgacggaggctcaccctgcaccaactgcactcgaggtcaccgatgctgcgactacactcccatctcggccaccgagtcgaccaaagctagccgagctcgcaagatggctcaggcattgaaggaatcaatgccggatgacatgagtcgacccagtaccagctctacttcatccggttccgcagacaacaagcgaacggaggccgatttcgcctttgggttggagagtgctcccgctgccggcgtagtatcctacaaccaggtcgcccatgctattggccactccacctcgctaaagccctcgaggcacatcggcaactttcagcccatgatgcaagaaactccttcggtgttgctgccgagcgtgaccatcgcatcgcctcctaggcgcgcggcacctgccacctcgggacagaacaacattcctgtgggctatcaatctctgcgtcccaacacctgtagctcgccctcgactatcgagtaccctcgatctgcccgtcctcagctacaccattcgcgcaccgggttcagctctatcgggcccgtctcgcctccttacactcctgtaagcaacaaacaggccatgtcgatgcccaccatggtggatctttctgctacgcccgacctcgtcacccccatgaccggcttcaactttgacaacggcgccatgatgtcctacaaccggaactacccttcccgacaggatgttggcaaataccctacgatggccttggcatcccacagtcagggcctcttgccttctgccaccttcgttcatggaaacggatactacagcatgagctctgcctcgactcccgtctctcccattcacccgggcaatctccgtcgcaccattagtcacggtcctcaactttacgcctcacacatggcgccttccccctacgcgcctcaaactgcacaaggtggattggtcggcttgggtatcatgatgcccagcggcgagaccgacctgtttgacggtctcaggcctcagggtcaaaacggcgctgccatctattccgggatgtaggcaggcacgaactttactgaaacacacaagaagtgtttaggcatataatcttgtagatgcggcgcaagaccgtaggctgttgtaggcatagaaatagaaatgcgatagactgtcatgatccgactgacgatcagacaaaattccggttacgctctaccaggctgtcaatccatctgtctctaaacgatttgccgatatcagtcgattgtcggttgatgagcgatgtcacgttgaccggcagcaacaggtagtacagatgagaatgtcaatttccgcgctggcccttcgatcactttgggcgggggtgaagataccgtttgattaggcgggcttctacccaactccttctcgccgctcatgttctcagccacagtgctgacaggcgatgcgaacgcgctgccagtcagattgaaagacgaccatccctctcgtgcggtctcggtgcgggtgacttcagcgaaagtgttctccctgccgcacttgcgatcatcgcacccggtgtcatcgttcgggccggaagttacggaaggcatgtgggaacttcgagggttcgatacgctggtgaactttgccggccatcgaaaggctcgtgacagtgacgataatgaaaactttttcgtcagcggcttagctaccgcaggcgtcgcggcatcgatcgtcgcagcgctactgagggctggcatagagcgtttcacagatggtgatcggtggcctagctcgtcggcgtgcaccatgtggatccgttcattgcaatctcgatcatcgttttcgggcccacgcgagtgcacgctagcaccgaaaatgttccgaaggctcttgcgccgcaagctagcgccagtcgttacgcgtagagacgcgcttccaagttgctggttgcgactagatggacatggccggtcgatccccatcgtcaacatgacctcttgtcgtcttacagatgcgcggtcgagcgtgccaaaagcgctgttccaactattcgctcgcaccgcttgctgcagatcggctctgtctccatcgcgatgcctgatcactgtcacgtcaggcttgaacgcgacttttgcgagaaccgcctttggagtagtaggcgtttcgacgtctacagaactcgcggaagaagcgggcggagaagtcggtgatccgcgagttgtcgcatctgcctcggttgcgtcgttacaacgttcacccgggggggtcttaagcgaagtggtgacatttgtcatactttcacgttctcttgtcgagtctcggagtacttgagcatcctctcgccgaaaagcctcagtggaagctccgatttcaatcaccgagattccagacgtgcgagactcggcgcctatcgactggtccccttcttctgacgcgaccgagcccgctccgtagctctgtcgccacattcctgggccggaaggtcgtactatcgacgcagcatagactacagtggaggtcgatgaagttggagatgctgaaatcatcttctcgacgtctcgacgagggatcctttcgatcgatgacggctcttgctcaagcgtctgcgtccggctagtcgaaatggtaagcgagacccgccttgcctccctgatcttgctaggcggccttggcgtttcaaaggtgtcttcaaggtcaggcgtgtcctggaagacgtagacctccatcgcatttgcgtttggtaatgccctccgctccgcaggatcaccgctagcttgcatctcgatatcgctgtcgctgtcgctctctgtgtcggcggtatccaggtaaatgcctcccctacgcgctgcgatcatagcccctgtcgcctcgtcgctttgatcatcctgatcgtcatagtcgaacagaagccccttggtaagggagacgacgggtcccggattcttgaggatcaacgaggcgatgctgtcccgtgagctatatgtcgagaaaatgggatcgtgctggtgaagaatgacagaaacgttgccttctgtcgaagttacatcgccatggaatttcaaatcattcgtatcagctccgaaacatggctcgcgtgaccttccggttgcttaccttcttcaggagagacgagacagacagaaggcggcggtaactcctttcgagccgccaattcgttctccttatactcggccgggctgagaggacccagctcgaacagcttcctcacatctccctttccagccttgcttgacagtggggatgaagctcgctggaacgtcaacggagagttcagggagacgctttccagcgaaggtcgttttctcggtagggatacgatcgggtaccgcgagatgtaggcatgggaagaggtgctcgatggagaagacggtgccttcttgggtgatttctaagcgaagggacagggagaccaccatgaatttcgtcgacttgttctcatccgatccagtattcccgactcacttgaagaatgggagggaaatgcgatcctgcttcgaatcgcgtgacggtcttgacgtccgcttgagcctcatcctcctcttcctcttccctgacagtgcccaaatcaggaactttcggcgaagaacctctcgctctggtatatctgttggctaccgcgaagggtctgacaggatcacccatcggcaagctccagaaatcctcctcctcatcctcttcatcgtcctcgtcgtcgcccgtttcactgctccccgagtcgtcctgacgatcgctggaatcgcccacccagaagctcttcctacggggagcgagtgcgggatcatccgtagactgggattgcgaggctgtagggacgaccgactgaatcctcttggagatttcgtgagcgatcatttggtgatactccgaggtggattgtgcagtcattcgttgtttgctggcgtttgatttgcgaatgggttccgtatggcctcgttgaatcggcaccggggaaagaggatcaagaggtagaaggctttttgtatcgattttcacgacttgatcgtcgaagtcgtcggattcagaggcggaagagccggttttgctcaaggtagattcaggggtggaagcgtggcgccgattatttggtgtctttctccgcgagaacagcttgtgcaagaaagaggatgacgctgttatggcagatggagaggttggtagcgtggcaggtctgaggcaatcatcctttttgaagtcgatggtggtcatgatttttgttgttgttatgatgtctgctgatccctggccgtgatgagggcggccccaaagtgagaattggggattggaatgtgtgatgtggatcgcttacgctgctgccaggtagattaaagagagtgtgagtgtaggtcctgcctagaataacccggttgggtggatggatgcaatctgtatcgggacgatgtgacagggcgcagtcgagcaggttgaatcaacgttccccgttgacacatcttcttcaccgaaaccagagtctgtctcttatacacatctccgagcccacgagaccgatcagtatctcgtatgccgtcttctgcttgaaaaaaaaaaaaaggacacccacctcatatgccgaccgcttcttgcacaaaaaaagggtggggggggggggaagggggaccccagatcgagatcggcgtgatgtcattcgtagaagaggggaaatgaggatatcgattcgccaacggtcatcatcagcctgcccatccacacctgagtcggacttgtcgtctgcgcactcacctataccgatgatattgaccgtgacgccgttggaattggctgctgaataagatccagacggggtggctgatggagattcgttgaggacgatggcgcggggtcccacggcggtagctcctcgtcgttccccgctgttgccccagagaagggggctcgtacgtgtgaccatgcgggaggtcgtttcgctgcttgtctgtcgacgtttcgtacctcgatttggcctcgtatgacaatagcttgccctcttgttatctcatgatatgctgttgtcgcctctttcggacgttcagacaaagggtgacctcattattatcatcaagggaaacctcggatccgaacaggaagggagacgatcgaaatttgcttccgaatcaccggatcaccctcatatttgattccgtgatatcacccccagggaactggtcagggtataacacctcgtcggcatagtgtaaacgaatcatttgcatgcttgtctaccatatctacagatcggcagatcgctactagctactatcatcaggcatatcgatccgaacccgagccctcgctatcgcttccaagacgcgccagtccacgaactcgcgcctcacgatcgcgtccaaggtctgctgttcacggtcggaggatggtagaccatgaggcgcggcgtggatgacgatacccgttaagagcgccgcggtgtagagcggggcgagcatgactgcggttggagagccttatttgtgatcgattcggcggtctgccccttcgatatgttgggcgaaggtggagtatttaatgatcccgatttaacacgaacaatgacgctgtgaagatttgatctcgctcatcgacttcttcggggtcctcctttgatcctgtttggcagggccaatgatgtcaccaggtaatatctttcgatcaagtcaaccaggcgaccctactgagttgtccgcttctcatcacccaagcctaatctccagccgttctggggtgaaggtaccggtggaacgcctgttgatgatgatagccaaagggatcagccatccttaggcccgcacaaatcgatgctcgatcctagcatgtaatcatcattcatatctccgatcatgtggttgcgcaggaccaagccgatctagatctcagtggactgaaggtattcccgctgatcgggcagtgtctggtcaagttcgctaaagcaagacgatatctgcacccaaggtcgacctccacctcatcgaggtcccactttgccctgatttacttccgaagtccaaattcgaatatgcttccgggcgaatggggcgctgcaaacgaggcgacacatgatcatgcttggatcttcccttgtcccatgcgtcaccgcagctcggccagaccttgctggagatctagaatttcgcagcggtacatgaggctgctaacattttggctactgctggaacgtcaccccgagtacaggagttatcatgaaaggagctgttcaggaaggtggtgtcgtgatcgatcttaacgacctccgccatcacatatataagctgtctcctctggagatcgtcccagattggaacggctcccgatatttgatgcacctaacttcctactcacgataggtaataacgatacagattgctccaacacaagatgcctcggctaccccgccgctttttatgcttccggtcgtcgtctagagatggtcctaccgtcaactccagagcggtatcgacgcgccccacgtacacaaatgccccttctagcatgtccgcagcaacacttccaaattcttgtagctatccccctggaagtcatacggttgccggcaccggggcctcgttcgaggaaggtgaaccggacccattcgagatacgcaaatgccgaagggatgagacagaggattatcgattgatcatcgtgcaagagacgttcttcgattcagtgaaaaagctgttgtcattgatgaaagactattggacagcggaactgctcgacgcgttgactcgccgagccgagccaatcttgtgcacgattagctggggatcggccgagggcgactacgaaattgcactcaacgcagtgtcactcggaatggacgagtgtaccgtcgataaagccgtcaagttagggctccgacagataaaggataccgaggttttgtttggtaagctgactcggtcaggtcagccggatatcgtcatcaaatttcagggttatgaatttgaaaacgaagcaacgcgtgagattgaggaaggatttcatatggatgttcatcctcctggagtaaccgaggtgctctgaaatatcagcacagcggaacataatggtcgtcgtggtcgatacatgttgcaacatcttacatacaccttatttgaaccgatggaatatgatgctcaggtgatctgtcgaccccgattcatgcagatgaggtgagtaccagtacgctggtcatctgaccgtccactgtgttacatctggctttatccgttgaaagagaatgatccagcgcttgactatggtcaaatgtcactcaaatagcctatcactctacacgcagaagtggagcggagcggttacctccgagtctcggccatccatccaggcgtctcgtgatgatggcagtccgttctcttgtaacgttatgcgtgatttcgataattgcaggtcgctgcgccttgtgtatcaagatgtgatgatgacgagacatgccctgcaagaatacgcattagtgaaggaacgctcgagagtcgatgtcgtgctcgcgataacggtaagagctatataggtatcgccagtttaacgactgtgttagtgagctaatttccggagagaggaccgaattctagcccattccactgccgagcgtgtagtcatgacgatcagcgaaagtcttagcaagtatctgtgcagtctatacccgtctggctttcggtaacgaaaccctaaccagccacagtgcagcacaagccacagtgcagcacagcgcgacgacagctacctgagcaggactacatcaagaaccagccaagctgcctcgaggaggaccaatgctcacctgccaccgaatattccacaaacaggcgcgatcagaactagccggagtctggcagactcgggaaatctcgaaggggacgactgggctaaacgtttcaacgttcggggatataccaacccatctagtccttttcaaccggtcatcgacattgatccccgaaggcgattcttccaagcattcaaggctatattgcaactcaacaagcaatggaccctggacgtattaaatctactggatcaagccgatcggacagaggtgatcaaggcccgaatcgcttggaacccggatgccgaacagaaccaagccacgatcgagacagattcctctgcgggtagcgtcttcatcatcggcagcgcaaaccagacctggctcacatcactggaagctggtaaaccacatctggggcaactgacccggacaggaagagccgatgtcaccatccagtttgtccgactgagtgaggcaaatcagagtgtgacggggtcagaggaacatctttatttccgaatgtatcccccacatttctcttttccttaatattggctcaccattgagcaataggcgatatactagaccgttgatgggccattgtgtaaaatatctgagacgcactactgaataggtcaccctatatgcatatttgttatgcaaacttgcatccagggaccatattcctcgctgaacgaaagattgatccagatttccttctcggttgtgaagttacggtgggcatcgattgacatagatcctgatccttccaggactttgcagcggccgggacctcctgctgtactaggcggcattactatctgatcaccacttcgaaatgagcaacccctgtataagcgctggtgcgatgttcatggacgtttccctttgtggcggtatactttggacagtgtaaactcggctgactgaagcacggtagcggtgtgattttcgaactttccggaccgaataaggccgacgaagcaaagtgaacgtccttgaaagcatcatcttttcataattaactggtattccggcaggctgttaactataaacacctaatggtatgatactagatcgatttggagaatggtcatgcacgtcaacgtcatacagaaggacttgcgcgggacccggcgaggaccacatcgtcattgtttgatatgcaatgatcagccaccttgcttcctagagtcgtcgaggaatcaggtgacagtctcgggtaacaaaggagaacgcaatgcaccaattgcgcacgacgacaaacgtagcagagaaggggacgatgtcagggatagtctcgcgtatcgccacccgcgatgttgcagagcataaataggtgttggccctgttattgaaaggttcacatctcgaacctctggcgtatgatctttttcgaagaattgagccctcgtgactgacgatcaagaagaaaccttcccataaagcgcgatgccctcccctagcacgtatcagggcgaaacttcttacgatccagcccattcaactgatcggtcaaagtctcatatgtccttcactcgaagcagcatgtggagccgaatcaccaaggctttaacccgcaaggttgaaagctcacagcatacctccagcttgtacatcgaggcattcgctgccgagtccgtcatgctcggagggaaaagcactatgaccacacccccggataaatttttcttcccagctttaggggacacccttcgacaggtagaaccctggctgaagacaaaagcgtcaaccaccttcgattacctcgagatattcacctttagatggggagcgactagatctgcatcgttggtctcgcggaatggcatcgagctccagactgggatcttgatagagaaagatactgaaaaacaacttctcgccttgaagtatcgcgtgggctgcgaaattatcgatagcaaagaggacgtcctcctggccgttcgggtgcacccgatcgagaaggtcggttctagagagcaaggtttcgagtatatcctgaagttcaacttgtaccctcgttccgaatatattgagtaatcagaatggaccatcgaagccttctctcattccgcgtggtaatccagaatgttgctgcagagaccggagtacttgccggtgctgcgcttaagtgagaagaatccagtcaggaccgttgtacctcaacctctcgagtccccgaagggtacttctccgatgcatgccgaaccaaggaaaggagtctgaacttgacgaacgtatgacaacgatgatcgtcgggttcaatgcggtacctttccccccatattgcggtgttgaagaagcgcttcccatatttgtcatacgcagcgagctgcacatcaaattgccgttctcccaggaagctgaccccgtcatacagaggcaagcaagagtgatgacattgcgtggcgtacgtgcctcttttgttgactttaacaaaggactttgagacttggtaaacggcctttggttgatcacactatcttagacgtatacagtcgctgccggatggacccgctctattcgtgattcttagggctaacgtggaaagcatacgctttctttgaggcggaagacgtacagcggtgaggcagacgacgttgcgacagatgaggtgctcacataaatggtgtctacatgacagacgtagctgacaactatataagatcttcgaatacaggtttggcaacagattttcgtcaagggtcactcttcaatcagcgccaccaagatgaacgtattttcaaacataacaattccttcactgacgggtgtgtctacctcactccaggaatggaagcgttcaacctttgaagaaacggctcgtaccgctagcagccaaagttcttgccatgaatccgacggaaggtcaacaggggtagaaagctcgtacactggggtaactcttatggctaaaagtgaggtcctagtcctcacagaaattctgtgccctcgcgtcctcattcagggctctctcgtctctacgagtggaccaggcgacgcaaatttcctttcagctttcaacaaagttctccagcagaagactgactggttttctcttgttctcacgaagttgcaatcggctcagctttcgggagcggccttggcaaagggagatccgcctgattcattcctttcgggcgccctccgctggaatggtacaggtcgtacctggtccggtagtcttagccttacccaggagagaacaaatcttgaaagcgtcgacatcgaccgtaaaaccggtagcaatctcatccacaaggttctctgttctcccgacaatttgttcgcttgttcgatcgcccgcggccgcgaaaacatcatgactgttcagttcgtcaagatcgagacgggttcgagtcccggcagaaaccagcccagatcacataagctgtcattctcgttgtatccgtctgtagccactggatgataggtattcgcttatttatcgcgtaatcaccgaaccattcatgcgcccctgagtgtccagcctgtttatcgctagaggtatacgcaacggatttcagacccctcccctccggcctctttctgcctcggtcgagatagaagcgatactccgggcactcttgcgacagtgaaaggaagtcgagacggtctttaagcgctatccctgacgatctcggccgagtcatcacgagtcaacggccctttgcttcgacgattccgcctgccccgcgatcaagtttcaaatatatcgcgtcatttcaccacttgcaaaggagcgccgcaccttctccatcttgggccacaatcgagtcatactatcatcggtccttacttgcggctcgagatgtaactagagcagcgtgttggtttatattacaggaaatccgttcccgatccatctgaaagccaaagtcgcaaacatcgtagagtcaggtgaaaagattaccaaatgacaagccaggcaacagctacgaacaagtcactcgcttcaaatgatcaagctcaggcaaggacaacagcgaaagacaacagatccttgaccacgaccgatatggcaggttcttcctccatcagtcatgctaaacccctgaatagtctcagcggatttatttcttgttggttctcgggaagccggaaaccacagactaatcacgtccctgccgtcaaagtcaatcaattggacaagcaggaggcagtcgtgcagcggccaaccgcccaagccatgaaagtcgcgggtgtgattgggagagccctcgcagctgcgggacccaatttctggtactcatctcagactcagccacgaggcacgatcgcttggtgggtgaacagtagtgtcatgaagcagccgcgacatctttgctgcttcacaataggcgaccttgcgaaagctatggtagagaacaagttcgagatcgatttggacgaggttgccgcattgacagatgagctgaaggctctcgaaaagttttggcgagtggagagtcaagaccaagtgttcatcgtgcaaaccgatactccagggaaggctacgcataccattggaagcgggagcgaggggcattccgtgatcatcacgcaagttatatgcgagttcagaaagccggacgaaaattagtagaataagcctcatctgaaccgccattgagcatgacgatacgaattaatcggaaatttactctaaagggtgctgttatgcgaatggtatttttgctgcgatgtgcctgttggcaggtaacatcgattggttggattctggagacgatgatcacgagaaatcccactaagcgaacgcggtgaagcgaatcgattcaagcccgcagcagcttctccgtcggtgaatgaaaggaaagccatgtttggtatcgagagcaacccgaagagagcgactacaaagcctttgttcatgaaacgaacatcgctgcagtcgagcaatcgtgcaaccactggtcggtccttcagaacgacctcgcaagatggcgaaccctttccctccgcgatttgcggtcgtctggccgcaactctctcgaaagtcaccgccgacaccgactcggaatgcgcggtgacgtcgagagtggaacccacaacatgcaccgccgataatagccaacatggtacagttgaagaagcggaatcattgcaaagttttatcaagtctgctgcgattcgccaagtggagaaatccatcgcgaggatgcttgtccgtaccccgcaggttacaccgcccaaaggaatcatcttcgaacatatctttgacaaaataaacgctgagacatccaatttcctgcgtgtgcgtggatggctccatgatatccaaaatacacgctttttaaatgcttggagccgagcgacaaacaaggaaaaaggggggttctcaaggttgatggaaagcacttcgagtcaaaaggttcgtgtcgactttctgtttttgcgtacagcgaagatccgttgaagtaaaaggcaatctactctacagtggcagatcatcaggtggcaaacggatactgacagacctgaggtatacgattatcactttttggtgctcactatcgatgaggagttcgacttacgtaaacagcttgaaacggacgagtctctcatcgtacgatttaacaaaggaggaagcgaaatgagggttcacaacagccacgccgcaccaactcctatgtttggtacagaaccgtctgaaggggatatttgcgcttgtagaatgactcacgagaacaaaacgttttacgtggcatttcgaaagggaagttggcttgagcaagacccggtcgatctctatcaagcttacggttttgtcaggatggaatgttctgttcaccaagatattgacgatttggtaaactcctttcaatacaaatctgcatgtcatcggctttcttaaaatcgttcatgataccgatgaactgaaaacgccttgatgaatgttttcaacctaagacgcgttttcttcaaccctcaccgttgccccacaaattgaagttgacatcgggaagatctcatttagttactggctgtcatgatattcacctcgaaccacgatccgcacgcgaatcatcctgacgtcgagggtttcacctgtttcgagtcagagcgtagcgtgttctgttccccgggcgagacaaaggctacgagtacagacccctgatgtacgatgtgtcatcatcgtagctcaaggctctcaattcgtcagcaattcgtcacagtgtctacatatacttgtcgcgatagcttttccgcgacaaatgaagagattttcgaaactcaacagcccacatgcacgcagatatgtcgacgatcttggcaaactattcgacagaccgggacagccgtccgtcagacgaggacatggcccagaatacagcctccctcttatcaggagttgcatcaagtggaatctcgtcttcaaccttgtcaagtgccttgaccgacatctcaaggcaattctttcagaagtgcacgctttctcctcagctagcaatacagaccattttgcagggcaaagacgccgtgttcaaacatgcctatgagtcacgaccgcttggactcactgtaaatcctcagaccagtcgatgccacgatacggtcgatcgttggcgttgaactttgacttcggacgcacaaagtgttattgccggtattgggggcaatttcacagctacagatacgtcgtcacattaaccgatacgatggacgcttctaatgcgaatcctcctccggtatggtgctagaatttcttgagatttagacccgatttccagctatttgagcttcagtaaaacaagagaaggtatcatgttgaactggtcgaacgcgagaagattgcggtaaactataaaggtggcatcaagtcgtacatgctcaagcttcgcgtcacttgcttggaggccatcgcgacgacggagcatcgttatagggagatgaacacgagtcaccattaccttgtatgatgatttgaacccataagcacactccctgggaagttcacgaaatcgattttgcgtcgcataggccgaaatgcatcagtgacaacctgttatggtaaactgttggattcacagcgagaatcactttctgcgcatagaccgccctcctgatcatttttagaaccctgcttcacgtcgagcacgggaagggcaatgactgcaagaagctcgctccacttcctcgatggaactgtaacaaaggagagtaaacagaggagaagcaggaaatcgccggtcactttggctcttatactttgattgccatatgtcggctggatgtcatacgcacgcctggttttgtcagcactatcgtcgacacggaccaaaaatggggcaacgttataccccatccttgccgccatcaatcgacgacagcacgttagtacgaaggttcaatcacaagaccatgtcagtttgcaggtcgaccagcttggactctctgacgcggaacagccggtcggtctcgagcttgttctctggtttttcgatgactgctacgaaagaaaacaagatcagtaccgttttcggcatgcaccttgaacaccagatgaaaatcggcgccggtaccgtctatgacgatattgcgactgcactgttcaaagattactcggattgctatagtgggacctattctcagaatgttagttgggcgtagacaagggttttcttgacatattgattgatacagcgtatcccagtggacgatcgcctggtggcccggtaagcaagacctctattacgccaacgttgaattgcacccagatgccaataaatcttcgaccgtaccgatcaaactaaaggagcgatattggctaactggagaatgcgtggatttgctgaagagatccgtcacgactggagtaatggcggtcgcaacaacaggcgaaaaaagcaaggcctttcatctagtcgagatttcggtgtctggaccttatcagatgagccgttcacttggacaacgagcgaagcaaggcggtgatgggaaaatcgtaaactggatttgggtcgaaatactactggcaccttgaagaagcccggaagtgtggtggcacgaacgataggagtggtctcattcatgagaagttcaggcatgtatgtctcctataccctgtaacgaatgtagtcaacaacagcgacgccgtgccaaatcacagttagccttcatagataaagtctctactggggcctggccaattgagagcgtagatttccccggtggagcccggtcttgaaggcttctgattctttttttcctgtactcactatattccagacgtttgctggaatgccaccaactaatgccttggcgcacatctacttggcctgctgtctgcacaggtacggcagtataacactatttacgcgctcttttatctgccttgtcttgcctgtatatatccaccagaaagatgagtggagcgagcggtctcttcgccgtaatccccatggcataatccctcagctcccagacctcgctcactcctcaagtcctcaagggatagagcttctggtccagtttttcgcttggagccttcatctctgcctgttttgaggctcattgccactagtttgtgcttatcaacatcttgcactagatcgcggctcacctcttcttctgcctggttaggcttctggtgaggagaagggattcctagctctacgtgattctacagtccgcgtcaccgttctcaccaaggacaacgcatccagaggcatcttgaacaagaaccatacatgtacaccagcaccgtccatagcgctcgtagagtcggtgccggaatgcagctagatagaagagtcggagctgtgagatcaggaagtatcggttgcacatcctcagcggactattgagcatgccggtagtaagcgatgggacacaaagctctgggcgtggattcggccggagtttttgcgtgttcagcttacgcctgcgaccataacgtggtctcgatgagatgctagctgatgagcccgcatcacggtcaacttgctttcgttacgttcgaagtatcgatctcagttagatgaatcgcatcctcaacttcagaaaagtccgctatgtcaaagtctactgatggcagacggatggttgggtgatttgataagcagcttggtgggcgtagcttcaagcacatggcagaaagggcggcgcacgagtcagcgcgtttgctggtattatgaatcaaagaccgtctgtctcctgtcaagacaatctacatcctcctttgtccataatcatactccgcaaggagacgctcgcttatcagccgccaaatagtccaatccagcctgcacaatggggcagataaattgcgctaggaaacaccatcgattttggtatctacgggaaagcccccctacatcaatccgaacgtctacgtttcttcgtgtcgtcgccatctctacactttcacaatcgagacaagaagcacagcgaagcgatgccgaagaaactcgaggagattgggaggaaaggcaaacaaattgtcaagtcagtcttttcgacgggttcgtcttcgcacggtgatacaacggcgccaagcaccggggcgccgtccgtcactcatcctacaaaaacgtatcggctggatcactctgagagctctgagcaatcgatatacacgggtcaattcgagtcggaaatgttcgaccctacggcggccccgactcagacatccgtatctgggccgcccatcccggcgtgcgagccagaatggaaggtgacggactttgtggaagctctggttgtcgcttatctcggtgaggatttcgctcctcatccgacctacaaggtgagtctatagaccagtgcatggctaccgatctccgcctttatgagatatcagggttaatcagacgaattgtcgcagttcacgatccgatggcaggaagttccgtctaagatcgagggaaagaacatgttcccgggcaaggtgaagaatcaaatctccaagccagacaaagagacttccccagtggagagtcccactgcttcgaagcgtatcgcagaagcgccacaaaacgcgccatcctgcacgtttgacgagagatcgaagacacttcttgccaatgttacgaagccggtcttctcagagaccctctattacgaagagaaggaaatctccggccaagatgaagacgaattcacccttctgatgtgtacgcctgcgattcgattgaagatgaaactgacgagggtcgcgactgcacggcaggtattaaacactttaggagttcagccggacaaggtcgagcacaccatagaggttacattcaagcgcgtttaaacttgagaacacgggtcccatcgacgtttgttgtcaattggcagagcagagatgacatgtgagatcgattaggttacactctttgccagattgccacccgatgtgcttgatacacttggctaccactatctagtcgagtgccgttatcttacgtaatcaagatcctccggtcgctacttagccactcgacatgtcggctaccatctatctgatgtccgacttgtatcgactattgcgacctcgtccaccggctgaccgttatcccgtgaataacagcagcagcgaccttatcctagcactccgagctggcaggaagtttaaatcagagacggatcttcgtgacaacgaaacgcgttcactatgagtctcgtaagtcttctagctaaaggctttccggatatggtaccgattcctaacgctgcgacattctgatctagatgcgacaagaagacgagagcgaaggaatcgaagtagcatggggtgagtatcctcgagctttcagtagcaaaacacgtgccaagactgatgcgtacgtctcgcaccggtcgacagaggatcagcagcggatcagcgcgttctcaaagttcaacacccggctgtcgagcatccaagatgagctcaagaagctacaggttggccgatttacagcgactacctatacgaactactccaaattgactcgttcgttcgcattcctctgtcacaggacgagaaggagctgtacgacgacctggagatggagctcgagctggcagacgaaaaggaacccgttccgtgagcatcccttgtgatctgccttctcatccctcttgaccgattcgctcatccccttgatcatcctcatcgaacacgatcaccgtttcgaacgttgcctgccccagctaccaactcgcctcgacctttttccacctgaccccacctcaggccctgcgtcaactttccgtggaacgccggacgttgcagaaggacatcaatcggctagaaaagaagcgtgacgagtgtgtagacgggatgaaggcgttgaagatcgaactgtgagttggcttgttgtgcaacgaggccgacacgctagagaaaaaaggtcgaatatgagcggcggagtatgctgatgcaaatgtggtctgggcagatacgccaaattcgggagtcagatcaacttggagacggatcccaaggacgactaggacgcaccttgaggttcgcgtctgtacgacgatcacgttctccctgtaacgacatatacgcaagatcttatttcacgaacatgttggatatctggaagacgagctgccaggcggaagtgatgggtcagaggggaaagtgatggatttcaagggagtcgcggcgagctcgatgtggaacggacgagcgtcagaaggctagtcgtgagcggatctttccgagatactcgctcgctccctgccggatacgtcgtccacttgtacgctcgaggctgatcggggaaactctgattcccggagtccagtggaatggccggctggtctactcgagcaaggtggtccgatacggcttcccgagagtactcgacgttgtcgaccggaccgtcaaggcgacattatatttggccaacccatgcatgtatgcaattgcaggaggccatcgcgatttccactcgtcatcttttacctgtcagtccggtaccaaatcccaactgttcgctctgttgtaggccatgtctctcaccttgctttgatcgaccgctctgagctttgaatcgcaatgtcgaggcagtggccagggtatcctcgttcccggtgcttgtttcactttcaaggttggctaggcgaggtggtttgccaagcttggtagaaaggaattcatcttgtccgaccagctccattgtcgccgtcgcagaccaattgatccatcgacgtctgccccagccgccatttatatcatacaatgctcctggttccctcggcagtctcgcagccaagcccagctcgaagaaagggcagcttcgtacctgctcgcgaacttcatcatacgacaggcctcgtgctcgtcctctccctctcttccaattcttcccgctgagcttcctttttacgttgagcttgtagtcgtcgggcctgttcacgtggacatccgggtcatgacaggatggggatgtcgatcgagaaagagtcggagccggcgaaatgtcgggatgggtgaaggacgacgaaagagagatgcggcatatgcgcaaacagagaaacgcatggatcagcagtgcacccacccggttgcgatgccgtaccccgccatgccacccccttccccgactagtgactcaccctctgtcgatgcccggtctttttcccgctcccttccaccctactctccgtcctgacgtccaccgctaattgtttcttccacgtctccctcttctcggccttgaccttttccttcttcttgtcccgcttgatcatactcggagcgaaagtcgctcggaggtgggttgcgtagagggtgtggaactgcgggaggagggttgggggtatctgcaacgtatcggcagcgggtgaggatgggaggaggtcgattgtatttgaggaagatggagcacagccgtcgccgggtgataatcgaatgcgaatttcagtaccttcaactctaggacctgacgttgcaggacgagacctgaggtcacacgggtcggttcgactcacccgtgtggaaaagttgacgtctgccccgttggtacacctgatcaggacgtcgtactcattggctccctcgttgacggcgtccatctcgacatcctcttcgtccttatgagtcactgctgcagaatcactgtacgtatctatcgaggacgatgccacacaggtaagggaagacatgtcaggccattgagtccggtccatatgatacagactacactcagcacaaggtcgaggccgatatcgaccgtcgtgaagaaagaaacccgccgacttacatcgcttatgggtcaaccagatgctccccgcccgactttcctcctctgcggctcctttgaaggccgattctaaccgggtgaggaactgtattcgcggtgcgggacgtcatgtcagttggctgaccagctcgtctgctcgcgctggtcggagtcctgggcggactgaccgtctggttgtctactagttcttgaggcatgattgacgatgactatgactggctctgagcggggtgatgcaggaggtgcgaggtggtttaggatgtaagctgtaagatatgggtacatatgctgtctgcacgcgaggtcggtcccaaggtagctaggtgactacagaagttgttcgtaaagtcgacttggccggttttttttacctcggctcgatcgacgccatctcgattttcactttccgctttcgaaatttcacgagctgatacacctaggtatctgcatgcatatgcagctggattcaaatacctttgtgctcctgatcgttgttggacggcaagatctcaccggcccactgcgaaaatacgcgccatctagcaggagcgctgccgacccacagccgaccgacgctcagctgtaacacgtcccatgtagcagggatcattttcagatacagcgagaatgtgaaagataatgatctcctggcctaggctgaccgaaatgtctaatgtggatcgagcaacatggggctgagaagttcccgcttcgaactccgcggagcctcatcgattcttctggaaccaggagcgaggctcaagccggtttttggtgagggtgtacggagcgtgggctttgaaccccgatttactcgatggcaagacaaggccgctccctgccggtagtctagcttctcagggcctcaaaacacgcgtcaagggacattattgatggcgatgttctgagacaaaggatccgcggaagatgggaaggcatatagagtacaagcaatgtaattgaaaaataccgcaggttaaagagagctctgttcttgttcgatgttacagcacaaccgagaccctgcctagaactttcgaaacggcctattacacatttgaagatgccgatcatcgacatgacctcaagcagactcagagacgattctttctatgaggatctgcgcaagatgctcgaacagccgaacgtcattgtcgatggtcgccggtacgattggcaactgtactcaaaatctcggaactcgacacacttgttggtcattacgggatcgcaggtgcgtgatctcgggcaggaaaatgcacatgagaatcgctttcgcctcgaagaacctctcactgacgaggctgggtggggtttgacaatggccgattatcgtcggctcttccctaaaagttactttcaccctatgccaggatggctctgtattgccatgatcgcttacgacctggacaaaatcacaaacgaaattaccgacggatctgaaacagtttcggttcggtccttatacatggtttttgcgcaatgcatagggacccatcgctatgcatgggagggaagtaccatggacgctgcacgaaccgtacactcggctctcgtgtttgcgggcgggaggggtgtacaatctgaccgcgcttcggaccgtacagaccgccggcgtcgagacatcgcgaacaccatgagcagcgacgacttgttgttatatgggaatgaactgctttcggataaaacactacagcagacgatgttagacacgattacggcttcatcattctaacgaacaagcagattgtgggatgacttgtcctcgacgataggctcaacggtagagtcattcttactgaaaagttcagcagactcgaaccaccataccgatagcaaacaccgatgattcttctcgctcagatacatcgagttctcgtcttgttcacacgacaaggaatcatgacgggtgactgctacctgatctgatgtcagcggtcgctcgaacagcagcattgtctttgcgaaagcgaaatgactgttacataactagcaggtacagccgggcaaattttataaccattaccaatttaatgttttgctatcgggcctgttcttcgttctgtcgaacaggtgaatagcccttgatttggaatatgcaaagacgtgtatacggcgacagcacctctcgccagctagacgattgcatgccaaacggcattgacagcatcagacatctcggggcgaaccatcaaaggaagattcatggcgtagtcaacatggctttttataaaggcaaaacctcggtcgttcgtggttgcaatgatgcactttcggtaactcaaagaagcttcatggaaacgctcaatgtctgggacaatgtcccggcaaacggcggtggtaccagagagtctcgtcacatggcccgtccatcctacccgctctaagcggcattttctatacagacagatgctagcttctcctttcgtgcacatcaacgggagttggtgcgaatggaatgacatagaatcaggcgatcctgggtacccgacatacgctctcatcgcgaaacaattagacgcgcaagatctgaacaagttgtctccttacacacacggaatccgcgacaggtttcaagtcccgatctcagaacaccagcaatgggctctagacggaaaacacgtttgtgccgcattcagatccgatctgcctcctctgtggctacgacgagcccggctccggctcggtgatgaccatgcaagctatccggatcctgttcttggtctcacccttgccctgaaagcacgcatgcgggcaaatgtcaacgcgtatctggaggcggattcgcaattcgatattatgccagtcctatgcgatgactcttcgatagtgacggcgtcggcgcgtttcgtggagtcgatcgggaaattatacttgagtgtacgcagtcatacaagcgaaggaagtgacctcctcagcacgaagcgaaatgagataaggaggctgttacgcgagctgagaaccagaccatggcacatcaacgatatagtagagcgatatatagaaaccgaccgggcgggcagtcgcgtagcatcggcgtgcggtgcgtggatgttgcaagatccaaacctcgtggacaaggtgaaggatgggatatctcgtctttcgcttgatccgtactctggtagtcttggggtgaccgcttttggacatacccggacccgtctgggagatggcctgagctctatcgaagacgacgtcgtcacggagtacctggctaggactctcactgaccgggcactttccgaagctttgctcgcatcagttgagaatgatcacctcttcaaagccttcaagagagaagaccttttgagacacttgcgaatcaagtcgaatcatgccgatgagcgtaacggttcgtcactacggtccacgacatgcgaaacttcggctgagaggcaagggtccaatgcgtcggaagtgcagtagatattggcatgtatgcaatgttgaccttgctcgcaaaccccattcgcgacgaatcgattgattcggctagctgtctgcaaaaaggatccctcggcgagggcacgtggtgagatggcaagaaagtattgtattatcatggcgtgcgcttgtatacagggaacccgagaggattgacggggactaccaattagagcagccttttttgtcacttagttcaagctcgaggtagaacaagacagcagcgtggtactcttcaaaggcacccagcaagcaggatggaacgcgatccttctaagactaacaccgtggatgatgcgccgatggtgtcgccatgttgatgtcgcgacacggagtgtctgtcaaaggaagagcgagcttcagtatatttcgtagagatccttatgcacataaatgtggatgccgctgatgtgactccccaagttgaccacatcgtactgctgccaatcatgccaatcaagagctcacgtttctccattttgatctctcaaactcgtcatgatggaggcgaataaacccatcaaaagctgcgtccgtgacgatggatccctggcagaacccctcatgctgctggaagagaaaatcatcatcaatgagtggtggtatctatgggagcagagcgatccatacgaagcgcctgggacagtcaacgattcattcttgcagacaagacatctatcggaggaagaggtacggttcgcggtgcatactcagcagaggacgccgtacaagtttgaattagatggattcgatcacacgcactatctagaattgagctcacaacagatcgacaaaaccctcgggaattttcctccgcctccctggctcaggattcttgcattgagactgtgggctattggcgacccgtgtcccctgctttgttttcaacctgaccaactcgagctacaagaaagcctgaccactgcaattgaaagtatggaccggcaaggcgactgtgtgtccgatgatgctattcaccgcgacgccccgtcggaggctctctcgctgttaggggatgtcggccgctcgattatcgatgttctaagtctggctcaggataggagcagagaggaaattatcagacagcaactggagaagcacatgaaaggcgcgaacctccatcgctcgatagcgaaaacggcgtattcccactttcaagagagagaccatccggcagtcctggcgtgcggtacagaatgggccataagacatctcggttccaaagtcaccatcaagcaagatggaagtaacaggaatgctgttaaccaaacaattcgccagcttgcacttgattctaccatcaactcgttgagtatcgatgacttaggcactgccatctcctcttgttcgaagctgggagaagcagacggatacacgaaacggatgtcggacttgttgtcgacctacacctgccgactatacggctcggcgacttgccctactatatcatcgatgcggcaggtccaggataaatcgatgttgaaactctatccagatgacacgaggcgttagcttcgacatcatgttttccgcctgccagcagcgcatggactttgcttcggggttaccgattggtagtataatcgtacatgagaaggaaacaagatgtacagcagagtcgagtcccactgaacaataaagctcaggtgctaccccacaagctgaaatgggagattttaactgctactagatcctaacgtgtattacatatcttcgtactcttccaattcgggcttacagcgtcattgagatgaaccgaagggccacgtctcggtcagatgatagctctagagtatgtgtgcgaaattgacaggacttgtccctgcgcggactataagctgagcttctccatcggtcttgaccaccaccatgcctcttataggttcctgctcaagggtttctgcgcgtcagaatcctcctgccacagcttgccctgtcctcgcgtccaatgcggctaagaatccgtaactccagagttgcacagcatcaccttcggttccagtgggggagatggccccgagatctccgatgtcgaaccgctcagtagcattattccacaggggggagtatacctcggtaaagatcgctggaatcgcagtcttgtcagggtgcaagcgtaagcgcaccttatcatgtatgcgacttaccctgctcagatccagcgatcgagtcccacagaagagtctgggcgcctcgcaagtcttccaacaaggacgtcgagcaccatgttggagttttgttggccgcatacgcatcggcgtagtcgaccgattgagacccgtttcggccgcacctatcgatttgtttgactagacccgccgccataagcgcttgttgccaggacctataatctaacctgtgttcagcgaacgaaattattcgtcttcgggtatacaagggcgaactgaccagaccacggctccgtgataagccgtttgggtgaattcctagaggatggctgctcatgagcaaccacggtcctcgtttccttctgttgggacgactcaccaatagcaaggtcctgttggtcagatacgcagcatttgcgacaaccataccaacatttgtcaggagacctattcggtcatacgtcagctgaaccgaagcttatgctcgagctgctatggcagacttgcctttcgggtacggctgtagcgcatcgatggtggctcgaagaacgctctgcgagacgttgttattgtaaagcagcgtaaacccgagatccgagttcaggacctgcacgaggaaattagcgaatttccgctaacaagtacgctttcgaaactcacttcgaccggagacccgtcctcgtcaagtgacaaggcgtagaagctgaggtttcctgattgcgcggttgtgttggctcgagctccggtagtactcccgttcaagctaccatcgccgtagagaaggctgctactcagattgagcgtctgcacatactcgtccaatcggatttgcgcagtctcgcgcgggatctcgacttcgaaacatgcgctggcctgctgttcccacaagatggcagcagattcgacgtcggtgtcgttgagggtgatgaggctggcgttttgaagacccaggatagctctcagggctccgggaatcaaggcagctacggcgacatagtcacattagccattacgtctccttgatcggcttattttccccactcactgttgacatcgaacgggactgtgccgaaacctagacccgaccccgagtccctccaattgcctaccaaccgatcccggatgacggccagattcgagcagttcccatcagactcgacgaaaggcatggcgagctcgatcacatggtcgatgttccgttgtaacaagtccccatacgtcccgttctgtagtgttgcctgggtgttcaagaatgtctctgctcgatcctgtccttgcggagtggacagaaagtagtgcgatagcgagggcaagagcaaaaaatcggtatcgagcatgacgtagttgtagaccggtgccgctccaagttcaggtcgaccttcgttgatgttcacataagaagcatagtcaccgatctggatgaaggggccattcaacgaatcagccgctagccaacccgaaacttgtgcacaaatctactgacggtctcttcgtggcagaccgcacctgtcgaattgatacgctcaagcacggcgcctagtacagcttccgaagctgtcggagtcatgatcggcaatagtagtctcagcgccagtaaggtatcccttccgaagtctagaccaggagccaccagagccagatcgggaaagccgaaatcagcaatcaccgagcgtgggcagacccttcgctcgctttgcgactcacatgtcaggaacctccaccctccggccagaaactccttttcatacgtcaagaacgacacctccttgacctgctgtctatacgcttccgacctattccccgtcttcaagccttgcaagaccgtcctcagcgccgtcgaagcttcttcagggggttcagtgaggaagatctcggtcggcgtcaacccgggggataattgcggttcgtccgtataattgaacgtggtcgaaaaggtgatcgaaaggttctgtcccgcatcgatcggctggattcggatgaccggcgggatggtgatattcgattgcggggtgacttcgaacttggcgttctcttccgcttggaacgacaggtattgaacggtcgtcccgtttatccagttcctgacaagctggacggacgaatcgttgtgcgctccgagggtgtagttgaagatttcgttggtcaggccagagccttccgtgtaatctctcacggtccggatcgaaccgatgagggtgactccgagagtggatcccttgttgaaccgcaggttcccccggagtcccgtctggttgttctccccctgcgcgggacctaacgtggacagctccgtcgagacgtccaactcctgcccatcttcggggacaaagtaggtcaagatccccgtgttacctttcgggaaagctacgatcaatcttgccggtcgtgtggacgcgttcgctgtgaggacgacttgagcggcgacgtggtcatcacggtagacatagttgtcgtatgaagcaaaattgatcggtccgagttcgagcggggaggtcgagttggtttcattcaaggccgcgacgtgaagtgtgggtgccaggagacccagcagggtgagaaagagtgacggtaacatggcgaggatgtcttgaggctccgtctgttctcggttccgcatcgccgatggttggagatcgactcgagctcatcctttcgccttgttactatatattcccgggaccacttcattagcaatcaagaatgtctctagtagctagtgcggagaccgaccgcttcagcgtccttgctcacctcgtcttgcctcttggagactgcaccgagcacctactatgggcatgtgaccaggtgaccgcctgccggtgttcgggggtataaagtcgcttgacgtcacccgtttcccccagagatactccgacgcaccggtccagatccccgactcgtcgatgcagccttgaacgtcaacgcatctttcgtctcacacggaatgattccgatcaagtctcaggtgtcccggaagtctgatgcactgtatacttgcctctcttgtcagccgggacgttgttagtgatgttgataagaatggatgctggttagccgcatccgacgttgaagggaaccaaatcgagtgatatgcttccggatcaaacagggatctcggaagtagaacggcgcaattggctgtggtaaccgccgcaggtccaggcggccgggcgttgggacggcgaatacacatgctgcgtctcttaactttcctgcaaagcccagaaataacccgagatctaagagcatgggtcggttcgagaggagcggaaggcgtgtttgccgagctctttacgttaggcattaattggtatgaccttccatagatgccgaacctgctctccactggccactggacgtccgtccatcgaagggtcacttttttcgttctcatgagtgtagaaggcgagtttgtcttgggatcttggacaaaaacaacatctcgtactccaactgatcgaccggtcaggtacctacggtaggggtccactcaagcattgacagggcacagttacacagttgtggaatacgcgcgtgtgaaagtcatccaggtgacgtatggagaatctgcaacgatatcatcgaaggttgttagggtaaatcgcacaaaaatgagcaccgaagccgtaatggccttgtttgaagattgctacgatcgccgacctgacgcaaatgagctttgcgggtgagggttggagttcgatccccgcggtcgtcactttgttaggatcgattttcgcgaatggtccacggtcctcgaataatcctcagtccggcgcgtggttggggtggaaggaggccgacacaagcgacatcccggaacaggcgtttgcaagagtataagattgaaagagtagaaggtattccttctttttgcttttgagaggaatgtcgcttgcatgcggttaccggcatcccgatctcccttcggattggaatactgcagtcctcgtacagcggaatatgtcgtcgcaggaaagcgatcggtagacgtgtatcatttgtgcaagtaggtgaattggagtttgtagcgcagacgtagctggtgcgactgtcgtcgaaagagaccttcgttcacgtaggactggatatagagtagctagaatgcaatcgatcgcatacgttggccatccggaaatgcctcagcaatgcgccgatctattgcgctctagatgacgacgactgagccatccaacacgtgaccaagtactgtttgcctagcgatgtctgcacatgagactgtaatataacgacagtatagccatgccagatacacgtaaaactcgttcgaagcaatgaataccaaaatgtccagctctatcgggcaatcagatcgtcccggcgaggtgtcagagagacagagaacgactcgttacggagactcggtccatcgactcgctcggactacttgagaagattcccctgaggtcagcctacgatcagtcgtgctggcgactgaacttacaggcaggcctcagacgtcccagaggttccggatcgcgttgtaatcgaatcgaatcaaccgtctattatgagccacgacggcttcaggctccctcccatcgcgaagaaagattgaaggtatgggcagatagccggccgcagtggggtcctgattttgttcctgcgcaaacattgcaagctctgcgcgtacaacgagatagaagacctgtattaagactgggtcagcatcccccaaagacaagaacgcaaagggcggatacgcacgtggaaatcccgcggggcgtaatgccggatatctgtccaatcgatatagttgatcgaattcgtggtgttaccagcgaactcatgagctctcagtaggatcaacatggagaccaaattcggcatgatgtcgaggtagtctatccaaatctaaggcgttgcaccgcagagcttcagagtgtccatggtagcgtctaaaaccacggcagccggaagctcaaacaggtggtcccagacgcacttcatcataacaatggacatggttcgtaccgagaaggactcgtgtccgtcgcctgcaaacaagcaacagtatcaactatggatattcggagcctgcttcaaaacaagatcatgccagactgatcgccttggacaagcttggcagataagactcgcatcgcaacagctttctcgttctcggccggccaagatcatctcgcgcccagcttcaccatcacgagatcagaccgagaggagactgaccgagtctatcccaaaagatcactgttggcatcaaagcaaacaaggtccgctggcgagcggtgagatacgctctgggagacgcctccgggaccatcgctttagccagaatctcgcaacgattagtctcgacctggcgaataccggtgctagagcagaccgatgctacttcgatgtccaggttactgtccatacaaggccagatcgtctgcagagtatcgaatagagtgtcgaacgtcccgctcttctgctcccgggttgcctcgtcgagagagaggttccgttcgagttcggcattcaaaatctcccagaacgaacggaaagccgcaggcgccgaggttagggtacagggccctaaagatcggagaaagtcagtatctcaacttgatgctgacaatagttcgacgtaccatagacactgtagtccaagattctggcattgcggctgttggcgagaatgattgacaacgcgacgacgttcggtgaggcggcgagaaaccgagtgatccggtggcgatcatttctggctgtcttatcgtgtatatggatatagtagtataacatggtcatacgttccggatgcgattcgaaaagtctcgcgaggacccaggcgataaagctttccgtgaagcgtgtgaagtctactggggattgtcgtatcgcagcccacacccagctagatatcgatggcaaggttacctgttctttccgcatatgattccggtttggttcaacccggaacatcccaggtcgtgactcacgctgccatcgtgccaccgagcaccccctgcagaacagtttgacggtccattttacgttgcttatacggcagagtgccgtcttctatgagctttgcggtggtattgggatcggagggcggagcagtaggtccgctgccggcgttgatgcctgctccgatgccgtattgcttcgacatgacggctatttgctggtagtggaatgctatacatatcgatcagctccacattatcgatcctcgcacgggcagagacgaacaagatgtatgctacggttgatctgacaggtgagtccgatccgagtagagctcgggagtgatcctgtgtacgaaacgcctaagtcagcgaacgctgctttccctcttcgtgattgcagaaatagaaatccacttgcgtcgtcgttcgttccaatcggcgtctgatgactagggaaggaatggattgggatctgggttgaggctggaggggtggtgaacgatgatcgtgggtgatgtagcgaacaagagaggtcgaggatggaagtggacgggtgtcatcgatgaggcggtttagtggcatcgtgggggtatccatcgtagtggtatccgtggacgatagataggcgttaagatagcgggaaatcgtaaattcgtggcgtcgaaagtcgaacgtgtcaagtagggcatcgattgatggcgatgtatcgaatgccgggaacatgatggatggagaggatcgacgcacaaaatcagtaccttgaagcagaagaattatgcgcaacacgtgccaggcagtcacatacggttagacgcttctgaatgcgtgctggacgatcaagttcggttcgagtaatcggaagatgaccaaaaaggatggtatgtcgcgtctcagtcgttcgaaaatgatcattttacaggttcttgcgatgaaaaaggacctacgtcaaggaacataccctttagcctctgcggtaccgacttgggttcgagtcgtcgtgacaacgtctagcgtaatggttcggaatatctttgggtgtccgtgtcttgatagaggtatggaaataggagtgtgtttgattaagggagatccagacgtgtcgagatatatatacccgactggcaacgggtgatgggtgacgaagagatcgcagaacctgatcacgaaatcacgaaggaggcgaaaattgttttggcccgtgcatcaatccattctccgttcgttcgtctatagggaagcgagaggtggatcggacgtcgagcaacctgcgacgcgctagaatcgagtacgacgacagcttcggggtcctcctcgccctgtcgcagtgcacgcgctatttcgatgagcagcgacaagttgcttctcggaaattaaggttcaacgcggggaatggagagacatctccgccgaaaaaaaaaacagcccgagctgatcatcctctaaaatgctgtacaacaagattcaagttagtcaatcatcatgaatacatcaagcccagcttatggtatgttgcttgagattcgagcttggtgaaatcacagaccaacgagtcgatgattgagaccacttcacgatggttaacacgcaagatcatcgtcagaccggctcttcactagctgcactacagatttggtctttttacagggtttttcgccggcgactcaagagaagaacgatttacatatggctggagaagcggaaacgatttgcgaatgtcgatatcgatgtcggccggcaaattcaagcgcgtacgctgatgaggtagctcagccgtatcgatttaggctgatcgaggtgtggatgccgagcagagtgtagccagaaggaacgtggtcattcttctcgagttctaagacccccatcgaaaatacctgactcacgctcaagtgtcagtcgaacggccgtacttggcgtcaaaatccttctgaatcaagacgcgcgttcgttcgacattggcttctacctccggccccaccgtatcgaaccagggtgccatcggtacggtatttccccccatctctgcaaagacgcacagcttgtgttggactgtctgccacaaggtccgaagctgaggaggcaggatttgctcgaggtcctgttcgaagtctgaaaggtaggacaacgtggaaaagttggccgctgattcctcactgaagatgatgcccatcccaaagagatttgggcacttcgagaagaaggggacccaatcctctggagatgcactatcttccatgagatctttgacgattgccaggacgtcgtttccaacctccacgtgttcgggagagcacgtgatcatccaaaacatggtcccaaagagatctatggtgaggtttgcgacgatgtgctcctggaatccgagtccccagtgcgtccagaaaagctcggtcggcataaccttggcgtcgaacattgcttttcttccagggacgtccgaatgcctttcggcgtcgattgccttccgtaagatgacgttccggttcagccggacgatgtcgatagcatacgcttcaagctctcggtcgatgactaaagtgttagaatcatagcatggagaagcccgatgcacgaaatcgctgaggtcctcttcttgagcggtttcgagcggcacgaccgagacgatttcggcagataggatagagaaccagcggtgaaaaagatccgatgcatcagacatcaaacactggcctgaggtgacgaatcggataagtatattttcatatacttgtaagcttcagccacttaccgcatgtaatcttgtcgggcttgtatcgttgggtatcgtgacgaagaaggacgatggcagagatgatattcgggcattgggcgacaagacccatgcgttggtgtcctgcctcgacctcgtcgagctccctataaagcctcaacattcgctcaggatggagctcgtataggttccggagtatccagcgcagaaataagtctgtaggtccattccagttccaatagcgtgccatcaccggccagatccaagcaccgcgtaacaatcttgccaggagtgatcttttcccatctcttctgtatacccatttttcacgtgtacccttgtacagtctcttttgtatcccgttcatggctgcacacctgcgaggtatggggaccccgatggcctcacggttggcttcctttgaaggcccgttcatcgcgacgtcggcaagtctgttcgagccaactcgatcggatatcagtacccgttctgcggtactgtccaattatacactgggtacggcgggaaggagaagactcacgcttcgttgttatataactagtcgactggtaagactgtattgattcaccttgacttgaaaaggtcgtcgatggtatccgctcgtcgatggtattcgctgtgatgtagacgcgactttgcaatggtggctaagcagatcgtctgtgagcacttgaccagaagattttaacacggtaggagttgactcacgatgagataggtgtcgtttcgatagaccagtgaccagcgatcgacgacagtgggaacgagcgacgacgaggctgacgtgaaggagcctttgttgaacacgagacgaagaccagtcgatcggcttctcagactcgtcgcctttgattttcgaactagaaccgaccgttgatcccagtgagcgagctagacaagaacaagaagtggcaaagaaccgccaaaggcggcaagatgctgttttcgcggcggagatgagatggcaaagtacggttagcttacagctcgtgcagctcggcctcttccgaaagttttgatatagacagtcaatcaaaatggtgatctggcgccagcacttactggccttggagcttgtgagccgctggtcctttactcgagtaacgataacgtaggagaagtcaaagtagaagagggagagagatggccgagatgcaaggtgaaggatcaactgctagccagcagcagccagcagatcggtggccggtggcgaaccgaatggggcaagaggaaatgatgacggatggcagacgaggcgatcaaagtgttgattcggggaaaggtacggaagaaaaatgggggtcgacccccacaattcgatttggatgagattctctgatgaacgcagcgtcgtctcatttagagttcaaggcgcgagagggagggaaatcgagaatgacgcaggtggatctggtctttggttgatcgactttctacgcggtccatttatcgctccaataacctcgactttatgcatggtgtcgtctgaatcgtcaagtatgcccacttggagcagtctcgtatacaatcaagccggatcctccatccgatcatgttcccggttccccctggcttccccgatcgagcccaacgcccttcctgaaacgtcgaaacctcgcctcgtcctgcctgtcctcctgtcgcccatcatcctggtttcgtaaacaactcgtcctccaacacagcttccaaatattcccaatcgacgttcttggcctgatacatcccctcgtacgctctcgaactggccccgatgaggaaaggttggagccgggccatcgagtcgatcgacagcgtttccgctaggactggacgtcgtcccgcactagcagacgggctgggcaggagtgcggtcgctggggtcgtcatctaccgtgatcgtcgaggaggatcagccatgcaagggatgagcattgaattaggaacgaggtaggaagaaaggggacgtacatgtgtatgatacctagcagcgatggcctctgacaacatctctgtcaacgtctcctcccgaatggcttccaaatccggatacagggcgtccgtcgtatccttgacaaacaaccattgatgcctgcgaatccaggaagcatattccaacaatcagacatggtgacggaatctctgcacgatccaagagcttacatctggaactcctccatccccagcgtgagcatcaagtccaggagcttgcaagcggccaggctcgtcctcagctcgatcgaagtctcggaagggaggtcatccaggatctcgtcaaagcttcgtatctatcaaggcatcgatgtcagctagtcggttgccactcatggtgcctagtcatactgacaagttcggacaggacgatcgggagaataccagtcaaatgctgtgacctgaatcgacataagaccactcgcaaacacaggtagatctggaacgatcgactcaagtcagctcccaggacgaagcggtggcagtccagcgggcaccatgcttacttccgacaggactaccgggtttgacgcgaaattccgcgatagatcgaccaggcgtgcttggatgttgggcagctggatcaagtaatgattcttttcgcagacaaacaggcagagcgatatccgacgtattgtcagcgctctctgatgtgtctcttgctctcggtttatgaagagattggcggccgaagtcaccacgagcgaccgctctgaagtttaggcaaacaagtcagctctatgctccaggtatcgacatcgcgatagacgcaccgaaaagctccagcaacttgtccttctcgctacctagcatggacgcccatagctttgtccacagcctcctcgcgtcgcctttcctcaggtcaaacagtccagggtcgctgaatgcatcttgaacgtatggcttccagctcttggttgcctgatgtatatgcgtcatcgactccagcatggagagaaattcggtatcttgaacgagtcccgtcctgtatgtagtaggagccgctcgtcgttagtgtgtggcgactggatattgacgattggactgacctcgatcgttgcttggctatggggctgacaataacgttgccaatgactgtcgtaatatgtacgactcgctcgtcctcatccaccacttctcgtaagcgtggaaaaaagtccgctcgaagaaaacgtagcagctaaccaacgcaatgcgttaatgctgcacggattttctagctcgagaccgtccgctcacgctttctgacgcctgcgtcggagccaccgcgccaatctgacccttctcgcccacagctggcgaccggggagcaccgtcacgagaatcggcagcatggatgttgactgcagcgtccagtagacgtgtcaaggagtcctgcaaacagaaaactcgcgggttacccagctgaactcgatctatccggacgaaagccgcttaccagcgcgtctttcttcagcctacgatcgttaaaggcggacgtctgggcaattttgcgcatcagggcaaagtaagacctgggaagtatgcaatacgttcagctcgaggtcggatggattgccagagcagacgagactcactccaagagcggcaacaaataccgcttcttgttgatggtagccgtcgacacattggctgccctcacgagcgacatcacagccggtagcacatcgatagcgaccggggcctctacttgagcaaagtatgcgtccaggacggccaagattttgccaggacgactgcacaaccggtgatcaaacggacctcgtcagcatgcgaaacctggaaacacagccttcagcgatatctcacctgatgttgttggcagtcctggtgcgctcggcgtccgaaaacaagggtgacagcatatcacataagagtgacacgagcttatgcgagctgggagtcagagaatccagaactagaagaagcgccttgggtttcaactgcgtgccacattctcgtcagcaaatcgctcttatcacattttcggtggaactcacccgaagctggtcttcctcgacagcgctatcgacgatggcttcgatcgtttcattcggtctccaagagtaaagcctcaacaagcacgcttgagctgcagcgatgagatcggggccaatggacgctttggtgtctcgagtatcgtaaaaggtaccgaaggtttcgatggcggcggcaatcactcccctcattgtttgcactgctcccatagccggctagatgtgaaacaccggtcagtcgatgtctttcaaggatctggtcttgaagcgactcacagcatctctcgttgcccgtgctgcattcccatcgccagatagaaccgtcgagacgtagccaaacagaccgactggttccgaaaatccgctagctggggccggtgtatctccggaaacgctgttcggcaaaatgcccctcacgatcagctcagcggcctgcagtaacagaggtatctctgcttctccgccgggatcgtggtgcgaagattctgtttccgtgtcctgaagccgagcccaaatctgttcgcaaagagcgtcggatatcggatataggatgggagcgacgttgccggaaagtcccgttgaaatgctaagaacgaaatcgagccagtctgccaagatggaacggtttgacgagacactgatgccggccaatatcgtttgtagcagatatgcattatccgcttgcggtgtttgtggttcagttcggatagaaacgtttgatcgtgttctcgcatgagctctggtagaagaaccgaggattggcgaagtcagctgttcccggccagcgtgctgtttcaagatgagagttttgaggaccccaaggatgggagtctgcagatccaggtcgcctccttgtacgcaagtccacaagcgagggagtattgcattctcgatgctagctagctcggggctggtccaatcgccgtgcgaaatcatcgaatccagaagagatatggaggccaggtggagcgaacggtcaattttggtgccagaaatcttgacggtcttttcccacaagtagattgctctggattgggaagaatgtcaaacggtaagcgggatgacgttgtttcgccactcggactcacttgagagcgatctgacagacgaaatcgcgatacgttggctctgatttggtgaaagctcagcatttcgaagcattgagcgatatggtctcgtcggtgctcaccttgcgacgactcgtccagagcaagcgtctcttccgctcgagcaggtatcggagaagttgccagatggttcgataggagctgtccaccgtgatcgaggatatctgccatcttgttgaggacgtaggcgacttgcttgagatcgccgtaaactccgatcgtttcaaaatcgatttggtgcccggccacatcgactgtggctcgtttcctaggcggcgataaggtaacgagacgtaggctgacgacgtccaacatcctgatgatccagtcatgcagaccgtatgagcgagattccccaaagaaataaggttgtcttactcacctgatatacaaccctagctcgcatcgcatccaaccttgggcgagccgtttgagcacgacgtcgtcagaatgcagtccatctaagatatagaatagtggaagatggaacgcttcctcctgcttcgaaatgtcgtctgcgaacgtaatcccaaataacgatgagaaagggattcgacatagctttggtagcgccacctacctgtgagtgtccagagtcggctgaaggcttgcacagaatccgtactagtcacatcgcctatcaatgaccgcatgacagtccgccgtagcagggcgggtgatgaagcatctgtcaccttccagagcaaggccgacgcctcctggtggtgatacagatgacgaggttgcatgaagtggaaaagctgttgagaagcaaacttcagattatcgattgcgtgagtcttgatcgccaaccgcgaaagcataccgattgcacgatttcttgtgttactgccgcgttgcgtagcttgaaagtgggcttgagccacggtgcattactgatcctgagaaccagtcgagtaaaggcagagatctcgtggaacgtgtctgcctgcataagaaaaaggcgtcagctgctgaacgcatgccggccatcagcccatcgtgtctcaccttgtcgacatccgcagtcatacgcaagaggaactcttctggctgccaacggacgcagaggtcacccgtcacgccctgtccggcgtcgacgacactcatgagtagctcgcattgaccggctagcggtactgtcgcaagttgcgggcttgtccatttgatgatagtctcttgtatgagcgactgggcggagggtgtagtagcacgttgcatagccggaggtcggtaaagggagtccgtggcgtaataattggtcgatgctgaggtgatggccgtatcgtcctgttcgttcgtcttcgaagcagtcatgctcgcccagggcaaagcttgcacgatcgcctgcagggttgagagcaataaatccggttccacttgacaaagccgttcatggtcctgcagacggcatcatcagcttcggttgaggggtcgaagagatgattcccacgtacagcgatcaagaggcgcaagatcagcggtaattgaatccgcgtgacctcttcatcttgtatccggaacgtgttgaggacccagattgagaggttcaaagccgatttctacccgaagaatcgaatgaggttcacgtcgtggtcggaaatgctcgctcgcaatagacagtagactcaccacctcctgctccccatgaccatctgctgttttcgacagtttgccgtatacgatcgaccagaaaacgtaaggctcgactccctcgtacaccgcccgcgctgccatcctcgcctttgagcagcaacgtttcaattcgactggacatcttttctgtactagccgtaacgcctcggactcacattctctttgaccgatacttccgctaatgaacgctgatccacttgcatggctatatccagggcatcatagacgagcgacatcgacagcgggtacccgacctcccatcgatcgagcagggaaacgaatattcggaacggccgagccgcgtcgagcgtatttccagcaatattcagcatctcttcctatcgaggcgacgaggaatgtatcaatggctattccttggtatcgtctgactcggctcgactcaccctcagagcgtcggtgaccagaccgagccccgtctttcggaacctgtcgatctgtttctccgactcttcctcggcgcccaagaaccagccgtacaacctcttgctcagactgaggtctcttcttaggacgattccacacgccgacttgatcaggatcttcttgtcggtgaggtcgaaatcggggagggtgatcagggagggtagcgggaggcaggtattcaagaggtcgagtgtgccacgacggacgaggagagagtcgtcttccagtccagcggcaagcgctctgacaaagagcccaccatccggaccgatcacttcggcgagtaaaggtcgagtcgacgagtctgtatcgagagctagcgtggtcaccttctcttccggtttgaggtactgttttagccggggtggtaaccgccttgacaagtaattgacggccgacgtcctcgatcccgggttggtgatcatgaccacaaagacgctctgcaagaaatgtgcatcgtcgatcgactcggacaccgtatcgacgagcttgaggactcggtcgaaatggtcccccgtctcttcctccaaacccggtaagagggccagggcgagggctttactagccgtacgcaaggatcgaccgagcgggaggtagtacgtctcgtatagatcgagcacggtcggacggaccgctgtggaagcgtattgaaagaatggaaagaagcctgacgaccaggtcggcaagtctcgtcgaaggccgtcttgtcctagaatcttgaatacctctcgatagacctcgagcgtcctctggtggaccccgctcggaagggcagggttgagtccctgtgcgagacgtttggcgatttgaatcttgtgtgggatctcagtgtaggtgggagaggcggagaggagcgctttgtgtaggcgggagaggaaggagatgaaatcggcccattcggccaccgagtcgaacgtcgtcaaggctctgtctatcgtctgagagtatcgtttgtagcggggatcactctgaagcagagcaagagatgcagctggcaagtaaaagaatgagaagcagcaagtccggccctcgacaccctccgaagggactcacctcgaccaccctttgtacgccgtgatacgtgcccatccccctccgagagcatggtcgtcccggtgacttctgccctggtcccatcggtcgagatggacgaggctctcgaccgactaactcgtcctgccatgatttgagagagtctaccttgactcgaggctggtctgtctatcttgtgatccaggagctcaccgcccgacggcggtaccgattgtggtctgtctacgtccggtgtcatttcgatgatcctatgtccttcgagttttatctcggctgcatcctactcgggccagatgggatgcaacctgggtattacgaggcgctctgtctcgacagaagtacgcctagagctttaggggcagtgcgggtggacatgaaaggtgaatgtgaagtagtatggaatgaggttgacggtcgggtcgatgacgaacttggctttggcgcaacaaggagatgaccgaagcgtcaacctcgacctcgttcaacttctactttaactactactactactatgtctcgaccactctctcctttatctagactttcaataccttgtttattgagggacaggcgtcagcgtaatatcacagcgctctcgttcaaccaaatcctcgtcgaagttagctacctcgattgtgataggacaggagacacaggacctttccagatcacttccggtttgcgaggatcagcggaaagagcagatgacgatgagcggcgtccacctggacgatggcacagcgtgagtgacctagaatcatatcccgaaccaggaggcatcactccgagagccagccgagctgaatgcccatgtcactcctgcagcttgcagagctcgtgggacctcgcgctctctcactcgatcctgcactttcgacaactcgtcgcttcctcctcgtcctcttcgtggaaacccttacccatcacctacccagcatccacttcgtcgagcgggtatcagactcctcccttggtgtcccccctgctagatggcatcaagggcaagacgacgcttcacaaacgctctctcaagaccggtgacgttttccgagccgtcttcgaatccgatggagccatccttccagacgacctagagatagatacctttcgaggcgctatcgtcgaacctggatccagaagccgatgggaccgcctggtggacagctgtagcaccctgaacgtactcgacacgaacacacgtatcgtccacacccggtatcgactgggatggccatccagccccagagactcgatcaccatccaacgacactacatcgacgatgacacgctcatctgcgtagctactagtctaccgagatctaagcatgaacccgcttacctgaaaccctgtccgccgttcgtcagggcccacgtgggtatcgtggcctggcttgtccagctcgtcccatctgatcaggggaggaagagacgacttcgcatgtcttgctacttcaactggacgcccaacggacagtgggctatcggagctagcgtgcaaactcatcttcccggcctactcaagtctctcagggactatgccgttggggaggccatacccgtccccgagatcgtgtggatttcacggggcgtctcggtcgatgaactcgggtttgacgctacaagagtcttgttcagtctcgattactcggtcgtacacgtcgatgaaaaggaggcggatggggacgaggttgaagatcgaggaaaagcgacggtggtctttcgcctcggcagccgttcgagttgggatatcgattttacgctacggacaggcgaggtggtggaacaagaggacgttcaataccaagccggacgccgagcagggtccccagctcaagctccagcctttctctatttccggttggacgtcgcaccgccacctccaaacttgtacatcaagcggtacaaggtcacgctcgagcggacgatgggcaaccccgatgacgtcagattcaacggatctttatgcccactcggttcacacgtcgagacgcccgtctgtcgtctgagcccgacgagtttgttgggcgattcgtcgagcgttttgagcgacatgtcattgaagacgacgaggacgctcgatcctttcggtggggtgggtctaggtcgggcaggatcgatcttgtcgctggaatcgggaacaggtacggatgcacaggatatgccgtcttccccgaaacgaacggaacagaggcagagatccgtctctgtggatactacgctggaaggcaagggctctcgaagcaagagtcaggacaagacggtagcctcgctcatcaagcggaattatatccgtaaggtcacgcctcgagtcgcaagtctcgtgctcctggtggctgacgaccctcctcgctggctacagatttcactgcacttttgcaggaacccgaagtcaagtggagacgtatcagcgagagcaaaggagtcacgctctactcgctcaattcgatggacaagacgctcgctatccaccgggtagaagccgtcttcgtcggggtcagtctctgggacctgttcgccattctcatgaattggggagcaagatccgtatgggacaaggcgtacggggatgccatcttgttggagcacgtgaacgagatgaccgaactctggcgagtcagccagaagggtcgacagtgagtatatcgatctgatagttcacgagcgcactcttatggtataatgtggcgtttccttacagatcgcgagacttgcttcgcacaacgtacaagagccacgatgccatgcacattttcagctttacaccggacgtcagcctctttccatcggtaccatactcggccgaatctagtcagttacgggaagagatgactttgcaaggatggtctctcgaacgattgtctcccaccactatacacgtcaccttgatcgaacaggtcgacgctcgtgcactcgctgccaaatccatcacccaacagatgcatagcgcaatggcaggtctaggcgagaccgccatcaaaacaggcgggccaccggtcatatcgcgtctgagtggagccaagatagcatcttcccgctatgacgtggaaaaggcgatcgtaaagtttatttacgaagcggccgtcgttcgaaccgttacggtggttccaaagacggtcgtctcgtccgcgttgcaagcggatgatgtctcgacgaccggatcacgtcgaggttcggaaaccccaacaatcgtcgaggaagaaaaggcgacatcaatggaatgccagatacgctgcgatccggatcgatgggcttcttccctggaggtggtcgtcgacccgcctccatcatcgttctccgtcctcaaacgacatcccttgatggagaacggcggactttggctcacgatcgagcatgaaaacgctagctcgccgttaaacagaaaagtcaccatcagtatacaagcgagacccacaacagggctcggtcgagagaagactgccgtgatgcttaacggtacaaacattgatatcaataaagcggatctagctatcgcagatgttacggctttcaagaagcagaaacgatcgcaagtcactcgaagatcgcttgatcaacccatgtctgtgcctctgctgcggcgtcgacctaccggcgctccctccctcaaactaccagaaggtgacgaacctcctcctgaaaccgaaactccagaagagatcgtccgacctttgccggagacaccgacgtgggccgggtctatttccggatggttgaacaccgctgctggaggcgccaagtctatagtagtcgcaccttctggactatcacccgagtcccacaagcaaggcccttttgatgccgccgcgggagcactggaacgactagtccggatacacatcgaccgctttagcgagtccactacgtctgacgaccagtggatcatcgcttcacgtaatggcaacgcgatcgtcgagaaaaaggttctgccgttcgtgtcggagagtttgccagtgtatcgctccagccggattattcaaggctctagtgccgaagatgtctcggccgtaatctccagtactacccaccgaaagacgtgggacgcagccaaattgctggataccaaattactggccgcctatggtgagggcgtgcacgttcaattcaccaccaacaagatggccttcccatacaaaaatcgcgccttccagacggtcaacatcgttgccagggcggaaacgggcggtcccccatctccagtcccgaactttacctcaacaggagatgccgctcttatattccacgcctctacatcgagtttcgacccgacacccttagccctcgatcctacgaaatacaatccactcagtatgccgatgggaaaggtcgtgctcgaaggctggatccttgaaacattggatccctactctcacgaccaattccccataccgtcgacccgatgcatgcatgtgtgcgcaatcgacttcggtatcccgctcgccatgaacaatgtcgcaaacgcagcgttgccgtatcgtatcctagcagtcgagaaattgctcaacgccgagtcccgtctgcccatgctcatcaatccagcctctggcgttctcctgccaaaaacgcttctcaaagctcgaaagctcgggaaagataccaaatacggcttggtgggacggccggaaacaactatactgagtctcacacatggcgtagatggtcttacccaagcggtcgtcagattgatgccgtcagcacaaaaacctcgtcgagggtcagctttccctgcggattggtacaatgacgaagcggccgagatcgacgtcccttcgggacagcccggcctcagcaaaccgagtcataccagaacggcctctgcctggtcccgcctgacgcgtacgcgcgccgtcagtcaacagctcgtgcgaggactctcagagaccagcgagcacaacgatcaagctttttcatcaacaaccaaggtgcacgcactagagatgatcgttgaggtgcctgccggtgtaggggaaaagttttcgatcgctgcccaaatacgctcgcaaccatcaaccacttcaatcacccccctgccaatcaaagatgtctcgaccgagattgatcagaacacgctgaccatagaggtagaaaaaacagcactgcccgtcctaagaggcgctttgaccgatagccaggcatacctcatcaagattcgtttgtcgggtgatacaacagatcacgaccccttggggtttcaacctgtcggattcccgcaagtgacagatggagaaaatctggagctggctggacgcatcttgatcatgaagttacaaaggttacctcgcgacggtagtggagaagtccggttcctcatggatggccaaccgattcagatcagggattctccgtcagtttcctctccaactagtatcaccagtcgggtcgatgcgcgagtaaagatgtggtccaagttgaagcggtaagccaacagggttctacctcagttcgtatcaagctgaacacccatatttctcgcacctcagtatcgatccccatcaggatgctcccgcattgaccgaccatataaggctcgagctctcgcctctagccgtcgattctagcgcacagcgcacagcgaaggaaccggttcctattggtccagccatggtcgaagtcatacaaacgaaagacacgtctgatgcgacgggtccggcttctgcaatcgagggtcgaggcccggatttggaaattgtcaaccaatcggccgatgctcgacctcgatctcaaaggatgaactcgatttacacttatctcaccagaccagcacgattttcttggcctgtcaccccggctagcaatatggatgccgcacccctgaccaaagatgacgccaaggaactaggctctgacaggaacgaccaagccgcccctatggaagccgaggtaccaagtccatcgcctatcgtcatatcgaccaaaaggacgatgtcgccgacaataataatggcattacttgcaaccgccgtccttttcttcctccttggatcgttgatccgatccctactaggcgaacatcaagactattatacggtcttgccggtaggggcgatctcgaccgaaccggaatggcaggaaatgacgaggatcctggaggtgaaagtctggcggtggcatcttatggtggcctctttacgtggccgggcgacgtgatgcgcggttacaccgcaatcccgctggggagcatccgctttataaaggcagcgattgccattatcatgaaggtctgtactaatatgcctgaattataccatgtgaaaaaatgacgatatgtgaatatcagggacgtgaggagctcgctcattatgacatcatgcaggaagaccatgaccggtatcaaccacgaaagccatccgtaacctctagctttcatcctagtacgatcccgactcggtgtacaggatattgccggatagccgatcagttagcaaggtctcacaccacgacggtatggatcaaccacatactcgatcttggcgctttgcgcaacccggctcaaccgaatcggctttacccttctttcactgtatttcaacctacgagacgaacagatgttaagtgttctgagtgatcctgtgaacgttgtcactaggatactcacattccgagtattctcagtcgcacactcatcactgtctccccctgtgcctattttggggttcgaaaagtccagtcctgggacggtctcttcagtatagtcgctgagtggtcgccatagagaatgagatgttccaacctttgtacacgacatgaccgtctccctcttggcttgggtagtgggaacgctttacccttccttccagactcacagaacgtagaccccgatatcatacctgatatcatcaagtctttgggaatgaaccatgtaggacgatcagtaccaccgtgatgacgaaaacgacgggtcggatctcgtgggagatcggatatctacgactggcggcgctatgttccggcgttgtttgtgaaccgggacctccgacttgaggctcacccggggttcgccaagctccgtagggtgatgacggaatggaatgatcaacgggttgggattgtcgacggaatcacccggactaaagacatgttggagagggtggggactaagctcgcatatgcctggatcatgagccagcagaatccgtcagagataggacagctggagccgacgggttcgcatgtcaatgagaaatctcggctcgtccgcgacaatctcgatatcatcgccgagcggttgattctcgctcttgacagactcgctgtcgattgattttcagcttacgagccaacatcctgtacatagctagtgacgcaaaccatgccagagcctgttgatgaagcgagtccgcgagtcgacggtggacgactgggttttatgcaaggtttccgacccacgacttcatagtgaatggtgaacagatcgatttgatgactgtggtttcgccgatgggattagaggtattcagtgcgggatgcaaggttcgcgagtggatgtagatggcagggcagatatcaagtggtttgttgcgcgattcgaacccgcgacttcggctttctggaaccaattctttgccaccttttccagctcggaaatagacaaattcgacgtcacagccgaacgctgctatccaactacgcaaaaagaacaggacacttgccaaaccattcttccccctcgatctcccgaggtccgatgcccttgggaggcagtgaatcgtaggtagatcgagagtatctttagtgggtcgtgttttaccactacaccatttactcgcggattgttcatagcctaatccatgcggatatgactcatgcgcgtccgcgggtttgggactcggggccatctcagcccactgaacatcacaagaagctggagcagatgttgctagtcgccctgaggcctcttagcctcttgtcattgagtgatgcaatgctgaacttggttcgtggtcttctgaatgtgcaatggtcgaatcaattctcaagctgtgtgtgtaacaatcgtcgccctctcatctatcataatcgaggtacagagcgtatgatacctgagaccatcagtgtgcttcggctggacatgtcatatcaccgagaagtctcgaagatgagtggacgcggtacatccaaacgaaacgatcgaagctgtcggacgacataggcacaaaggttccgccaattacgaaatcagaatcaggagatctatcactttcctaccccgatgtaagagcgaaaaaatgagttatgtttgatcctccttttatacgacacaagataccacgcagggatatcgtccaggctatcgtgctatctaaatcacgaaaaataggttgagtccattctttgttgaccgaggccatcgacggccctcttgtgcataaccataaatggcacgtcatttgattgttcgggcttctgaaatctacttggatccgtgacggtgaagcgaaatgcactgatcacgatgtcaaggtgagtatatagaatgtacgagtactgtgataccactacctccaagaacttcgattgcggctaccaaagcccgcgaaccagatcgtactgatgcataattccctcagacaacgttcccagtcgcgagacggccaatggcgccgaagagtattggttcccgggacgagggtcatcccagacaacggagtcttgcggcaacgaatgttctctatcgtaaagtagagcgataattcatagaccagacgttaatgctgggcaataccagacggcgttttggttgagcacgaaggcatcgcatgccgcgtgcggacgcgacgtaacaagtatcttcagtccaccaaaggtctcggaccagtcttgtctgccgcaggtctcgattcgggacaccttggtgcctgctcgatatcggttcgaggccaggatgttgttcatgaagcttgtttctctgagtatgcaaaaagatgccttttcgacgtgcttgatcgattccacgaaccatctcaagcaagtgtgcagttcaccgtcaatcgaatgggtaaactcgcttgccgaccggtcaggtttgcagacgatgtcactacagggccgtcggggacacgtatagtgatggcatcttcagagtcggattctctatgattcaggaaccgtgctgggaatattgcgcaaaaatctacaaaaagatatatcgcgaccgtgattcgaatcgcgtcccgtaggatttacgcgcgacctgcatgactcgaggtgtcgaccttgtccatgttttcgaaccttcatatctctacaacctgaaggcctagcgcctgtacgatagatgtagatcgtagagcgataaaaagagtacaaaaacagaagcgaccgcttgtgttttctcagaccctcttcttgtatcgaagcgaccgcttcagattcgccggacccaaagcgaccgctttgaccccggagaccactaggctattccgtcgtggttaaatgcatacaaaacttagcctttataaatgcacgtgatttgtcgccttttcgaaactctcagactggttcatgcgtgcggatactatcgctatacttcatttgagtggcattacagtatcatggtcacacggtccgaacgtcctgatcgctataatccgcagaaactgcttgtgtctcgacaagtcaaagagcccaggatgtcgtatacgacgtaaagagaaatcggcgaaattaacactcgggaccactctgaccttttgagcacttaaactcgacggcaagatacttttgatacacctcaaaatctggatttctctgtgtccctcatccagtgtccgcctgcatgtttcgcactgtccactggtcatgcttgttgtggatcgaattatacttgcgaggttcggtgcatgtctccgttcaggggatacgaatgtaaatagctggcagattgcacaagcgccgacgttcaagagcagttcacagctacaacctcatgacaacgagtcatctgatcgccagtcatgctagatcacaactcaattctgcgagaacctcgccgttcttaaacctggcgccatttggtagttggatatccatccccgggtggtcgtgctcgacctagttctccctcccgtcttgctgttgaggagataactaatgacatcggcgacgaaggttcgtgtccggtacagcgaatggtggtacaacaactgaattcaaaacgcaccgtacgtgatgctatcagcccgcatatgaaacgagggacgtcacgatactacaagttgatccgattaggactcagccggtgtagagcagtagccagcttgtcctgaatcttcaagagatcggccggcatgtcgatgtactccggcgtagggctctcacacgtttcgtcctccaaaaaccactggtgcaccagccaggcgcacgctagatcggtaccaccgatcctctccaacatttttagctttgcctcttcctctttccccccctgttgttccccttcgtctccattgatctgttgctgggattcgtccaagagacggttcagaagcggccatttggtgttcgatctgagcttctcaaagatttgaagaatactgttcttcggcaggtcgtagatcctaggtgatgggccaagtcgacgtctaagtgctgcgagtggtatgtggagtactgagctgagacgactaaggcgctgacgggcttctctgctggggacgaggtgcggactcctcgcttccctcggccgctcttgcctcttgtgttcgacctccttgaatcggcgtgatgcattgctccgcgagaatgccttgaccttctcctgaacacttttctttccagattttctcgattccaagggcgtcggtcttgataacagaaaagcgtctcgtttcatcagtcgagtcttcatttgagaacgaatggggcactccaacttacccagttctccccgctggcactgctctgacccccgcttcaaacctaggtctatacgcgggttcgtttttcggttggtatttcgattcatactggcgctcggcggtcatgatgttcgcagcttgatgtgtagcggtgatcggtgtggggtagaatgaatgcctttcgaccgactcggataataggaaatgacgaaggatctgcgatatctacatcagctcggccgagagcgaggcgtatccaccgtgactaaccggatcgtgtctgagactgtcgcggggatcaacgaagtatcctctcacatcggtggccgtcaagtgcttcattctttcggcgatctcgtcgacgctttcacttcgatcctaatacaaaggcgtttcaaatagtttcagctacacggcctgcgatgtgatcatcttctcatgtacatcatgccttgccccctgacccccgttccgtgtcactggaaggtatccgtatccggccgatctcgaagtgattgtcgtaggtgtgttgttgagtaacgacgatgaggagtcgaggtaggttgtttggtggtatgagtatttgggtgtcgcctgattctgagattctgttgctaggaaggtcggatcttgattgggagtgtcagtgaggttggcaggtgcattctccgaacgttttgtgcggcaatggtgatgggcgtcgatcgggtctgtgactcaggtcagctcatcaaaagtgctgttagaacacatcatcatattgttactcactcctgaacccatgctccatcttgaactgcgaagaacagtcaatcagaaacgccatcattaaagttcgatcacactctccccaccaccgcggctcgatctcgacccatcgggactcaccaagattgggtattgattgaacttcggaggtctccacagtaaacgtatgcttggaaaagtatgagggattgaaaacggtcaaacggacgagggttgatgtgttgagcgagtcgaaatgtacttgggttgggatgtcgaggggaatgcgcgagagaggccgggcctgaccgatgaccgagcaatgagcagagggagggcgtcgagggcgtcatcagcttagcacagtcaagcaagaatcattgaccataggccatatgaggattatgattcgcacctgtcgttcgaggtcctaatgaatagagatcgaagcagatgccaagatgcaccaatgtcttctcgtatcgagtaccgatagcacgaatcaattatcacttcgggtccacgtggtgaatcaagctgcagacacccgcgatcaatcggtttcgtgggttttttttcataggatgtcgtcttctagtgtagggatgagatttctcagcccgatggctgggaaatcatgtggttcaaagatctgtctatcgaagtggagaatcgctgcagctttgtttcgacttgtcgagccggaagcctcaataactatcaataaatgccaggtgacatttgatcgtaccggcttgtatcgtgtctcgtacggatgatcggcttcaaccgtcttgttgccaaagtagttcccagatgaagatggaagactcgccgtatatggagtcgatctttgggactgggacgcccaacggccgagaaggtcaaatagaaacggtatgcgggtaagatggccagcaatgaatcctcttcggcatgtacatcatgaggagtgatatgacatgacaaaggaaacagataatgaccggatgccacgagcaagaagtaaagacacagactggtggttgccatcgtccgtaatcactcgttacaggcctacagcctccgcctgcgcgtgatatgaatgagtcatgttcgagtgatttgggctatgaataatccgcgagtaatagcgtagtggtaaaaacactacctatgaaatgctactctccaatcttccgaaatcagcccaacagccgatcgagggaggtcggagggggaacggtgtggcgagtgtcccgtttttgtaccttgcatctagaaacctctatttttggctacaacgtatggaaacagcaatgagaagccaaacaatcacagtgctcatgcagtgcgcgcgcgaggtggcgagtgcgattcccatcgacgccatatgatattgcgacgccagacctgctttgccaagctacgcgtcgacgactgggttcgggataccatctgatcgttcgtggcaatcgcctagtggaccttctctgcaccttctcaaggtacttcgatcggcgatacgcacatgacggcccattaattcatctcgagaaccgatctcaacatcgatcaaggaattgaatgctatcgaagatgactgaagcgatacatcgtctaaggcaagccgatcgcaaacgacccaaaccactaccgaattgctcaatcgtgacccagtctgtcaagcgctgcagcgaatcgactaatgaaagtatggaaatcctcgctgtggtccagcaaagcgactgggatctgaagacgttcctcatcggaaccgtacggctcattgacgaggcgccaggcgcaggcgagttcggtgcccactctgttcaacatttccttcgtcctgtttccgccgtcgatggggacacgctggtcgcgccaattggctgcgatcctaacgagcttaggaaacgctgggtgatcctccagaacgtggaagattggctggagcatggccctccaattgtagatgtatgggctgggcaagtcaggcgagaacttcgacttgagaagagctagtgcattggaaaggcagtaaagaactgcctctcgccctcgcctcgtagccttgtaatcccgaagttttgggccggccgcttcaggtcctggacactcggtccagataggatcgtctccaatgtcgacagtgctgccatcactggaaccatcatcatcctgaatcatgtcgggagtcccgtttggtccgactgcagtaacggcttgttgtcggctaccgagaaggagacgcttggctttcgcacgctcggcgacgactttcttcttcgctgagttccccagcttgtcgtagtcgctccctcccgtcttccttttcccatgcgaacctttcgttttgacctgattgatgggcatatcgccgttagatctaccgccaggagtgctctgctgaaaatgcgaccagatgaatcagcgatgttggaccgtcgcgttgagacgatacgacctcgctcaccagacccaaaaacggttccgcctgactcatcccgctaacctgccaatgggtttcatcgccatcggcttggttctcgtcaggctcctgcaaccagcaacgtgatcatcagactcggtgggtggtatgtcccaaaccgaatcaagctgctcacctcgtacccagtaaatgtgtctctctctcccttatccgtcacgaacaacgacaagtcattatcctgaaacgagagatgatcgccatcctgttgagtatgactggggcctgaagtggaccgaagatctgactcacaacgaccgggtctcagtgagaagtaccgtgcgtactgcccatgatgttcttgacggtcgaacagggtgtatcaaggcgaagttggaatgctaggcggcggggcagggaatcggcagcactacgaaacggcgagacttggatcagatttgatggcaaaagtactctccttcaaagtcgccctcgatctacacacctgtcgaatggagtctcttcaaccatccaaaattatcctaagcggtacacgttctcagttctagatagactgcatctgagtatgtaacgatcgaggcgaatctgatacagaaaagacgtttgatcagaaacacggtctttcctctcgatttcggtgaacgccgggtcgcactgctttggaaagtactcactgttctggctgtccagattgcgcggcagtctggtcggtgtggacttcgaaacctattgatctgaattaaccttgatagcactaaggttgatgcagaatgtaacgtagtcgagctggtggttgagtatgtggtcatgtagaatgtggaatgatggttcgatcagatcactcgcgatcaaaactctggcgagggtccgcgcgcgcaggcgagaaatcgagagaccagcctccgcgcccaactgctttcagcaagcaagcaagcaagcaagcaagcaagcaaacaactagcaggagccgagcggaacagattcgggtcatcgatctatacctttgcgacatagctcatagtttcggagacctgagttttcatttaaaagagtatagtcggccagagagcaggctctcgcatcgaaatacaggcaggaccgtcgggtagaatcgtcacgtttggtgagaccaagcgatcaatactactcgtcagactataaattcaacggccttgagcctgggctgcaggaaagttcggccacgtagggaaaacggggaatgtcgggaaagctggaaacggcgggaaagggggaaacccagacactcctccaggattcgtcggctgaccggcagctggagacggaccagcggattgaccggtagctgtcctcatcaccatctttggcggtttcaatgtggttgcaaaggctttctgcggtcctggtgggaagatcgtgacgtggcatggtgctgggacagccgcggtccgccggctttgaatgtcaagctcctccgctagaagagcgggggtaggatcgaacgcgagtttagttggcccgactggtggggcagctttcgataccccggctcgccagctatgaatcgagcggtcacttgcattgcttggcatgacgggtcgaggtatatgattctgggcagagagattcgaccctttcgagccagacttgtccgtcgaagatcctttgctggaaccgctccgcacgggggagacctctacttttacccctttcgcagaagtgcgaccatcattcgaccggccatccagcgagtatgtgtatggcagaccactgttacgcctatcgctcattctattgaaagcgtcgtaatccttgccatgtcgaggtccatcgtatgtcgcttgaaaggcatgttcacgacgtgcacggggaccttccggtgtcctactgctctgcttgatatggacttggtggccattctgcaagacggaagcgaacaatccttgagttagagctaacgttaactcgctaaagtcaagtaagcttaccttgccgctcctcgtcttctctaactcgtaagtatgcgtatgccctgacatgcgcttaggaatcggcgggggacgattgggtgggaaagggggttgacgaggtttcttgccgcccgtgaaccaatgaccgagagtttgtaagggggtgaccatctttccatcataatcctcgaacgcgaggttcaaagtgcaccatgatgatgaagtcgccccggcatacctttatacggatttctgagcagcttgagacggccctttgtgactcctccgaccccttcctttgtgctcggccggttgattatcggctcgctatttcaatgatatccaccaaagcatacgggtggggaccacaggcggggtccgagaaccaggttttcgtgtcgtgaagcttagctgagcaccgagattgacccgaaatcgtatgatgaaacgcgagaaggttggcgttgacaacttctcgcttgatttcgggcccgaaaccagatgatagatcagtttggcgtgagcattctgttcgaagtgaacaaccgacatccctagagcttctcttttagcaagagtgcccagcttacgccaatgccgagctcacatggtattcgtcgttcacgttgatccagctcgttgcagaggttggttctctctgcactcgatcccagatcgggtcctggaagaaagcttaggaggggaaagaatggtttggcgagtatcctgttcttttttcaacccggtcatagctgccctgcttcgagcaggaggtcactttttatgcgaatctgagccaccccaggtgtaaatgtttgtgacctgtgttgaagaggtcgcgccttcgattcctgtccaggcgagattcattcctgcaattttccctttcgcgtgctgacattcttgttcttccctacctacagatctcgatgataacccgctacgacatcgcaatgacatgccgtacccggcatatatagtatgcagcccacccctccgatattctgcctgactagaatctttcgatcttgaacggtcccatgcccagctctgctccgatatcaccaggaaatgaattatgtgaaaagacagcgggtatttcactacctggcggtgacaatcgacacagagcttcgggggtggcagcacgatcgacaatctgggcctgtcccgtgtagatcacctgcgtaataaggaaacggtctgacagtaggaaccggtcgtcaagcctgacgaagctcccaggaaaacgatggtttacccatgagccgcttggttcccgatctcagggtcgtatcccattctgttcgttaacactctccctgcgcattccatgttccgtagcttgccatcagaccaacgcagatgggagtatgatgagtgatccataacttggactgcacatcgacttgcaatgactcgctgccaaaccagagcatgggctgcttacatcggcttcgatcccttgacgagcgatgtggagctcctacgcagatgtagtccatttcacaccatgacaagccgaaagccgggaggagcaacgccaatatggtattgtacaaccgttcatacgaaaacttgaaatgagatacaggcaacgactcggctcgttcatagactacatctccattccgacattttatccgcagatcgaaaatcatcaaagctgttggtaatctcggagaaaccactcgtcaattcgaaatccggttccaggatgtgatctagagctacggtcaatctggctttgattgcgacgtgttccgacgtttgtccataattgctgttgtccctctccagctcttgaaggaccggttgaaacatccaggcacagacgagctcgcccccaatcttgctcagcatgtatcttgtgatgtcgagctgagccgtgggattcaggcccattgccaattttgcatcccattctgacatcaacaaaccgagcttgaggaaacccggacttgctttgatgtggctatggatgggattcaaagttggtgactggttgatatctcacggctcagctcgatactagcagctgcatttagagcaagactgggggcaagctattctatgcctggatgttccaacaggtcattctaaaaatggatggatctgcggttcggtagaccaagatcgattccagatctcgagagagacacctacattggcgttgatatgcaagtttttgaacgtgtcctccatcccactgttctcggctgacctcgaatgccagcctcgcgagatgatgccacccttccagatgacctctcggcaattgcttctgaaaggagccagcccgcacgggatcagcgctctcgacgaacggatctagaaaagacggccagagacgtaccgaacgacccacacggccaacttcatggcgtccagcgttccggtgagccggtcttatgacattcctctcgacttttgctggtctctacaatcctgtaaatggatcttcacccggtcgagcaccatgtgcgcgagttcacagcgtcaggtcacgcaaaggaagaacgatcgtcaaatacgtcgcttgactcaccttcctcacgtcggaacttcttgtttggtctcgattggtggcatgaagaggcacgctctcgtctgacggtccggtcggctctagccagtagtgcaggtgcatctctttgcgggtcctacatccttcttactgtttctcacgtgtcgtgggctgtagcgcgcaaatggggttcgtccacgatctctggtgaaatatcttgagcggggtgcaggccggcctcgagaaggaaaggaggaagagtacccacgctggacagtcaggaatcctcggatcgttcctctgtatgtccttctctctctcgcccatagtctcgctcatgttcagctccaagccaatctacggtagatgacaacgaatgacatggtcaggtcatcatagtcaacgtcatacatatatcgaggagtttcaaaggaaagctctaacctgctgatcgaaacggtaaacatttcctccggtaggagtcggatcgccatgggataacgccaaccgaacagagcgctatgatgcagtcgatttcgatcgttatggatcagcatcgagtgacccgaagagtcgagcatgctttcaagagggtggagatgtgactcgcctcgccttcccggtcggatcgggtatccatgtccacgtcgatgtcgatgcttccccctgatcgacgcagggagcggggtcgcccgctgatccacgataagggccggccggtgggcgatgaggcgtggcaggaagaagcaaggtatgtgatgcgtagggttcacagtatgaaagggagatggctcagcggtgggtgacattcgaggttggccgaacattgagccgagcctcgagaacgagcgggacgacgagtagcacgatctcacctgccgttgatgtgcaagatgaatgactcacgactaacgcctttaccggactacaagaggttgtccgacagagcgaccatctcttttcgacggcgacaaggatgcgggcatgtgatatcatggtatatggtaactgtgtgtgtgtgtggatataggtcgagcaagacgacgcgagaagcgatatttcggtcgatcacgcgcgtcacgaagcgagcgagggcaggggagggagggagcgaatgatccactttgctcgggtcgatcgccttttcccatcaaatcactcgctctccatcatctttttgcctcccttgcatcgattttatttgttgatcaaacataatcaggtctccagccttcgattacgaatttcgacgaccaaagtcgactcggtcggacctttgccactcaccacctaaggttcgaccttgaaactggacgcccagacggacggaaacgaggcgttctgacgagttctgcatgaaacggactccgaaggatgaaaaccgagccgcggacatagtgctatttcctttcctgccgtcacgcgtcttcaatgtccgcgtcctagagttgttgcgtctccccgttgctcgctcatatccgcgacctagaaatcaaccctcgaaagaggtatgaggagctctaaccttctctcgcctacaaaccaccaccgataccacctctctcaccacctctttgcaaaccgacgatctagaaatatggcgtgagtcttgctccagctcgccaacgtcgatccggaacggctcacctagaatccccgtgttcctctcttcacctaaacgcagatccaccttcttcaactgggctcgttcccccgcagccagggaatactttttcagtcagttcccctcgtcctggtatctcttcctctgtagactatctagacgcgggactgatcttatacgtccttgctcgcaggtaccaacttttggggtccggtcgccaactgggggctccccatcgctgccatctcggacatccggaaagatcccgagatgatctccggtacgttccaagcactctttcgagttccgtcttgtaacctcaatcgtcggctgatggtatcatatgatccggtacatgaataggtgtgatgagcccgactatggctgggtactcgtaagccctcacagcgtccgggtagatgtgaaatggaatccgagctgatcatctcatattcactcaccgtgtcctgctcgcttccccaccaatgctccatacgacactgtctactcgaccgctctctcgaccaccgaccactatgatcacctccaacactcggctaccatccttggatgacctggatgtcacacgccctgacgacgacgacgggacactcgatcgatggaatgtcggtgtgcacaggttgatcttcatgagatttgcttggagaggtacgtcgatccgcatctatatccagaatcgacagcgcttggtcgcgaggtggctatcgagacgatgctgatgttccgtctctcttccgtatcgccctgtccgcttcgttctggatggatttggtcatccctctcggcacactatcgacccgtcttgctcaatcatcccacgtctcgtctcggcaccgactcgcctcattctatcaaacccgatcgtctattcctccgccaatgatgctctcatactgcatcatgcgatactacacctcggacctgcacgaccacccacccgcacgcccaactggaacccaacccactcttccaccccctcgccttaccacacctcacagtcattccccgaaactacctcctcttcgcctgtcatgcgaccaacgccaccgcccagctggtacaatgcggacgatgggctcagtattggaagtttgggggcagggagcaggccaaggggatcgctgccaaggtgagtcgggtcgatcagttcgggaaggctccgccgagcagaccggaggtttcggggtttggcgagaatgcggcgctgggcgtgatcaagtcaaagtcgcggaaggagaacggaatatagaccagcgcgtgggaagtccggatgccggtgatgatgctgtgtgcggcgaaaggctgtaggagcgatcgagcctggacaccaccgtgcatcaggctggatgcttcgtgtgccagctctgcggagcatggcgacagacagacggagaggtcgcgtctggggacgtgacaaacggtgggacagaatcgaggaccggtgcggtcatcgtggacaggacatcatgcgtacgcgaagggtcagcggaaatgcagtcaacagactttcccgggatgtcgactattagccctgccccgagtacacttgcaagggaaaagctcgacgagcgtcgtggaatgacacgacgtgacaccatcgcaagcttggatgagaatggcattcggatgccaatagattggcgtcgtattgatgatcgggcgggttcccaggaggagacttgggctcggttcgagatactcttccgtaacggcggtcctggaagagctctcaaaccccttccaacccagtcgactttttcggcaaacatgtggcctgcaatcgatcgctgatccccgtaccaactttttttatcgtgccgtcacctcgctcaacgcatccgcctgccctttctcacccaacctaggccgaagacgccgcatcatcagtaacggaagccgccaagcaagtctcaaacaaggtcaagaatgcctagacctcgtggttcgaggcgggacctggatctgccgaccgttaagaccggtcgtggaatgtatacgtgttcctttctaccatgacccgaaagatcatgccgaattccgtcagtcagcactaccgctcgggtcgtttgaggttattgcgatcctttgcatagcggatctagtgtcgagatttccggtgcaagaagttgtcgagacgacctgcctggacaaaggtgcgagaggctcgcgcgtctgcgatagaccagatgcggatgcacgggcgtgtttccgagtcgagatgtacatggggcaggcgatcgtcacgatccatgagcatgtcaccggtgctgcgagaatcactcactagtgctcgagcaagggccgttctcgtttctcttcacgtggaacgttttcccgcatctgattgccggtgagacctcgtcgcaaggggggaaatacgttcgaaggtgtccaaacggtacattccgattcctgatcttacccgaaggttcgatcacagctatgccgaagatcccagcgacggacagatcgacggtgtacctccggtggtggcgagatttctcgggtcgtgacggcgatcaatctggatgatctagtaacggaagggcatggaacgccaagacagcgataccgcgatgatctcgcgaggatatcaagcgtagggaaataatatgatagggtgcccgcgaatcgaacgcacgacctcacgcgtatagaccgaatgccttttcaccttttccggcctaccgatgatcaaaaacgatattgcagcacactggggcctcccacgacgcagctgaaaaaaacgggacactcgccacaccgtcccccttcccctgcctgcgatcacagtctcttgaaggaggttgtgatcgcagataggtgaagagtagctttggtaggtagcgtttaaccaccacactattactcgcggattgtttataagctaaaacgcttgaatatgactcacgcgcaaacgcgcggatgtcgatatcacgcccatttctttgccgtaatcgtcggtcattttgttcctatctaggcttcgacagtaccgcaacaagttcaactccccatgatattgagggaggggacgagtgagcaagatggcgccagaagctcgatcagaatgcctataaactcgccgtgtgtcacgtcgcgcgtaacagagagggaacgagacgtgacatattgaaacccattccacttcattttatttcgatctattgctatgcatatccaacgtcgccctcccgataacggctttagcaaggtcgaagcctcgttacggtgagctcttccataatagtataatccttgccgatcttaggaagcagtactcttctcaatcgttcacaaagtgagtcagaaccgaaacgtcgatcagtagtcgtgttcacaccgaccagtctgtccattgcaccttgtttgtaactcgagttcgcttgggtcatggtaaaaggttcctgaagactcaatagaatcataccgctttggtgtccaatcggaagacagaccagttctcgcccaaacggctagcggctaccctcctttggtgctttcaatcgagatgtcaggcgaaacatcctttggcaaataccatcgtcatcatcatcttgattataggaatcataatgatgtcatgcttatctggtctgatctgtttgacgatgatgacgatgaagtgctcgtccagttggtgtctgtcgagaagaggaagacgtcaaggtaagccaaggatccgacaagacatggatacgcaaagctcactcagaagatcatatgatctcccttttagctcggaacatgcgaaggaagatgatagactcgacgcgggcaagaatcagacagaatcgtacagatcgcaattaaccttcaaggagtttctggattcgaaagatgcaatcatccgactcatgaaggaggaggaatcagttggatcttcaagtgaccatgcaccgactttcctctggcgcaacgattcagtgacgaacggatggcaaaagagcgggtgagtgagctatgtagcaaagctttgaccctgctgttaacgagactctgggtagcatcagtccatgtatcgtcaatagcccaaaccctatcactccccatcacaaccacgatatccgataccaacgacaaacccatgaaagagtcaacgagccagtaccgacgggaaatcgaacctctgatcgtcagacccgtcccgaccgttgtcgtcggaattgtcctgacttccatccatatcgaatacaggaaggtcaccacttcatctctcaagacttgcccgctggaaaggatctcgctcatcggctcaatcgagcgagaggcaagaagaagggcgaggaagatatgacaccacgcatagcaattgggccgaactcgatgctagtcgcattgggttccatgcagcgctggaccggttctgatgccacacccggatctagtggaggagcattcaggcaagtcagcttgtcatccggtccgatttctcgtaagatgacacgatacggactgatcagtcgctcgctcgcgaccatacagaactgaggacgggcctgacgatccggccagaggcgaggatcccgttgagagtggagaaggtaggtcaccagccattcttgcagtcgattgagaacattctgatgcaacactacaggttatttgaagattacagttcattcgtcggagagcggtcgagccaacccggcagcctggcgcgaagcggagatcgagtataccatcagcatttcccaagcaccgataagatctactcttacggttggacctgcagggatttcgaatgcgcctttcctcccattcgatcaagcatacatgaagaatacaacggctaacccaaagttggaggagaaggagactttcgagatttctaagaggaagtatagcgacagcgatgacgagtaagcattgcctgatgtgaccctctatgtgtggttactgatccggtcgatcaaattgaagtctagatccgccgagatgaccgtacatcagtaccaaattgccaacacgagggttccccttgacaaatcgacaaccggaatgtccgagagagctgtcagaattcgaactttgaatgctgacaccctggttctcaagcgaatctaccccgtcaccgaagcatagaaacgactcgccgatcgtggcgtcatcttacccccactctatagtcctgtacctgtaaggcccacgagtgacgggtacgtacgagatgcgaggggggttctcagaatcaggaggatctacgaagaagagttgctagaagagcctttggagcggtgagtagagtaggaatcctttcagccagctcgacctggtgctacccccactgtcattcagaggactgtcgtgtgaaacgcttgggcgcttcacgacggaaaaaactcccgttgagtaagatcctcctacaagcagtcgcttcgaaagcaaaagctgatgtagacctctttctcgagttatacaaacctcagggagatgagaccggacaagattttcgacttgcactgatacgaccctctcgattgattcgatatgaccgatgtaacatgtagatgacggtagtagtattcaagcatatcatggtacaagccgattgatcagtcggcagagctcacggacattaaatatgttcacaagtccgctacctgctacctgatcgaacgaccgatatccgtaactgtgctacatgttcgtacgacctgaactgtgcctgtcattccgacacacccagtcgattcgaatagacaattcctaggctgcttcggtgcgcccaatgtacaactttgcgacatggctgacacggacgtaccacgaaagtatcggctggaacgaggacaacctgtatagcaaccttacgcggagttcatctggtgtgtgtacctagtcttgctcgcaaaaggccttcagaagggacactgatgagaagcatgctcgtccttcttcgccgagatagctattctgtgagtttggcgaactgcagggtggattcatgcttcagcgaactacgctgagccactcgttcctcacgtttcgcagcgactttgcaatccccccatccttgatcctacagctctcaaagtcacccacaccgctcttcttcacctcgtattcccttgaagccttaccacaactcaatggatcgatcagctacatcaccagctcgatcccgctggccggggtgagctccggtgacgtaaaccgtctagagtcgtttagctgacgattgaccgctgcgtgacttgctacagatcaccccatctcatggggcaactctcaagtccatgacaccgcacttccagacatatccctctccgcgaagaccgcttccacccgaagaagagtacctcgcaggcgacctcttggttcctccccgagattacctgctctactctcgacttcacctaccgactctccatttgagtgctctcgctagtaccaagctatcgaccaacctgcaaggaagccttgctttcatgcattcaccgggatcgctcttccgatcggacgttgggagcagcagcagtagcggagcgggatcatcgtcgagctcgtcacagcaacagagcggaccgacctctccacccagtccaccggcaaacctgctcttgtcgctacagcaagaccacggacgatgggcgaccgaatacacgtactcggccaaggacgggatgttcggcctgcgaggcctgtggaatttcggtctgaccgaagagatgcttcgtccgacagcattagaagattatccgatcgtgcataccaatggtccgggctctcttaatcggttgatacaccatgatgccgacggcaaggacgtggacggtcaacgaggcacgctagtcgaccaggaggacagctcagagaacggcctaaggggcaggttctcggcaggtggagaggtctacttttccgtcaagcagaggagtcttggatgtaagtaccacatgataaaggcagtcccgagcagtgctgatagtttctcatgtgctctatctcagtgtcgaccggacttcgattcacgacaattcccaattcggctgccaatccgaccgcagccgtatcgcctccgacaactctgaccattctctacaaccccctgatgggtttcctctcaacgtcatatgcggcacaagtcacgccacatctcgctctcgccagtcggttcggagtcaacgtctacagctatgagagcgatctctgtctaggtggagaatggtggatcggtaaaggcaagggcagctggatcgccagcaatgggaaggacaccgatgtcacaaatggtggagcgccactggagtccatgactgctgcatcgacggcagatcatgacagggatggagtcttgcgggcaaaggtctcggggaatggagtgagtggaccatcctcggttgattaccttgtggtcgaactaaattgacgttcctgttttgctcgcagaccatttcgctgttatatgagtcgcgaatacgacactgtctagtatcggctggcgtaatatctgatctctcgtcgaggtccagcccggttcgagcgatgggactagaagtgcaatactttgcggagtaggcatcggagcgacagtcgatgtgcccatatgcgaaaggcgatcgtttgatattacgaagagaggagccgtacatgtgatacgataacaatggacatttaccacctagaagcaggactgacgtgacctcgaagccatttgtcacccgctatcagtagtatacgtgatcgcccagttgtaccagctagcagtcttccttctctgtaagaacgccccgacgagaaacacacagcgcgaaacgcttttgaaactcctcgtcgtcgtgtcgtgtcgtatcgagcgcgggtattggctagctcattctatcggccgtcactcgcttgtcagttttgagctgatgcaggacccatgcaagaaagatgtatgagatcatgcccaatctgatgtgaactgccgctattctgaagatacaaattgcggtcatatattctgttcgacaatattcgactaactgcgaaggatcccagcggcgtttgatcgagctctgcttcccggcctcaaagagcttcgagagcactcaacgatttgccgtatagagaatgaagcctcacattggccagacccttcgccttgaaacccccggcgcgatagtgacattcgaggttccaagcgcacgtgaacaggattccccattcgacaaacaggtccgcagccgggatagacttttcagccgcgtaagcgagtcgttcgtcggcgactcgcatgatctcgctctggtcttctcgaaggcaatcaaagatcgcgagtacgaccccttgcttgtacgtcggaagctctacgacctccgattcgatcatttcggcaggacaatcgagggttcgggcgagccttttcactacgagtgcccccttcaaccgaatcaacgtcccggcctctccgctgctgtcgctgctggaggtgtcacggccggtgctcgtactggctcttgcattcctgaaccatgtgtggtacatgttcagcctggtattcgcctatacgggtatactcggcatcgctctgggactcacgtttgctcgcccttgacggcatgagttgtgtcgtcgctcgccttcaaggcgccaagaacacgttcgcgaactttacgagcctgtttcttattcttttttgacatcctggccttcttaatcttggccttgtggcccttgtctttcggcgcttggtgggacggaccggcacgctgatgggcttccccctggtcggggttggtctggtcggtgtgagtctgggtattggtttcgtggttcgtgggacgagaggccctgatggtactgagattttacggcgtcattacgagtcacttcagtaaatcctgttcattcggttgagggcgagcaacgggaaacacaggaggagaaggaccatcaatcttacctttcagatttctctacgttttcagtctccggcgctttgcactcttgtttgctcctttccctgcggtcatcatactcgaagtatcgttttcctcgttgactctgtcgctgctcggggtctcgctcgggtccggattcgatggcagggtagcacgtaaaggagggctgggtatcgtaccaataaaggagttcgaatccggaatcggattcggcaccatccaggtcccacacttcatgtattttctggccttcagaatctttcgacttgctttcactaggaatactatcaaggaagacaggtctaagcgatacgatcgatgtctgatgatgcatcgatcatacgtatcgagatgttgactcacagaccaggttccctttttacgatgggaacctgctcgagctgctcgcttgagcccttcggaggaacagatgacccttccgacatatttgagacagagacaaaagaaacgaaaggagggtcgagtgatcaccgaggccgtttctgggccgcagccagagggctcgcagagaaaggagggtcgactgcgacagaatatattatgtcagcttagcttcatgttcgtcttggttgtcaaaatgaggggcaaaataatcagagatctcatgatgatcgtctggtaggcgttcacacgatcgtcgggaccggtgcgagaccgtgcatgccgtttcgctcctcctctgcttcgacttacggaacgggaaggcttgcttggatatagatgctccaggcgatttagcgttgcaaggtcagattcagcaagaatgacggacttcgatcgacgtgacgatgttggcaaggcaaattgatcagcacgaaattcgtcttgccccgatcatcaactttacctactaaggcgatcacggatcgcagatcacgactggctccactatgtttggaagtggactgactgcgattcctgtcgaacgtcttgccagggactcttgagagaggccagacgagaatgaagaagaggatcgaaatgtcgaggagttgagtgatggagaagagacatcattcaaggcgtctcttctcattccgcccttgcttgcgcgcgcggggaggggcaaggggcagcgctgcgggcgtgaagttagactcgcctgtcgttcccgtacgcacctgatcaacgacggtcgccgagacaaacatgactaccatacgtgtaccatctgacgtcgtccagactatagtatacaggatgatggtaatccatgtgagggagggcggcgaggacatcgggctctgtgcgcctgtgttgggtccagtctcccgcgcgcatgagtcctatcgcgatgttttagcttagcaaacaatccgcgagtaatagtgcagtggtatcaccgccctacgaaagctactctacaccctctcagcactcatccgggcacttcggtattgcagagatgggggtagggggaagaatggtttggcgagtgtcctgttctttttgctataccgctccaagactcttgacagccgagatttcgtcatttttagtgctgaaaacgagctctagtcttgcgggactgtggcgtcccgcgcgaatgtccgaagacatgcgttcgatcccctatgcggccgattttctgcatgattttgctcgctttctccttcaggtttgaatcatacccgttatcgacagtggcaagctatctctcggcaattccgatcatccaggcagtcacataccgaccataagcaccaacaagaccatcccacacctctgtttcaggttgccgagtgtgagacgtgagcgggaggaatcattcggacgaccggcatgaactgctgtcgagcgataacactctcggtcggatgttcccatacggatttggatgcttgactactgagacacccaacaacagcgtccaaccgttcgcgattggtcgttgcagatgttcaaaactcgattgccatgcatgccgattggatgcacgaatgtcactcatatacaacttgttagatatcatgctcggtcgaggctctgtctacccgcgagtctgacatacaccccgtccgcttccacgtcatgctagcgtcccttgcactctgtacttcactcagtccacctcgactcgtcgtactgcttcaccgttctccccgtaactagagcggtcgaagagtggcggaccgcgtttaaagattctcaaggtcgtccttgagcctctgaaggagcttcttgagagagtcagggatttgatcagactcgctgagtaaagaccggttcgcaagtcagtacggaagaagcctgatggtcatcgagtctgcaagtgaactcgcccaaagtgtctgggagggtccagctcggcaggcggctcgacctccttcctgatcatcgtcgcacgatcgttcaaatcccagaacgaagcaaggactggcccgacttcattcaaaatcacgcgagagtcctgcttttgctctttccagtcggtcatcatcctgtatggcgaaaaagaccatcaaacttgacgtcaatcgcttgcactcgatgtactgaccggtgcagcttggccatgcccggttgatcgccaagagtgtgcatgatcgaggagagaagggtgctgtcgcagtggacgatgctcaacccgctgtcggatttgactagacgatggacgtaggacttgggcaggcgtaatccgagacacaggaggcggagggaagagtatttgtgtgacagcgagtgagtgcgaacgaaatcgtcggtagaagacccgggaggggaatatttcggatcaaatctgatgcgaatataccatgaggtgtaagagtttagacagggtgtcgaatttgagataccagggctacaatcgcttacgcccgaagccttcgcaaagcacgcttctctcgaatgtcggccttgcccttcttccgattgttacgaaagtcggttcccatgatgggtcgatcgttgtctgataccgacgaaaagttgggagattttcctatgacttcactgacttttcaaaaggctcaggtccacaacaacgagggaggagataggaaggcgagacagcgtcacaatctattgatctgatcgatctggctgcgcaggcagctagacggcacgatcggtgacctcgagacgcgagacgagggctggcgggcccgacacttattccacgtctccgtgcgaagatggcggagatggccgagtcgcgcacggggtatattctactgcttttctgctttgcaacggcgagtacaatggtgtagtggttaaggggtagtaccctaaatcaggagaccagaagttaagcaactcctcaattgggtacagacctactaccttgcttcctagtgaagcctgcagggtggggcatgacttgattgaaggggggaagtttacttagaactgtttatactttagaatcggctagcccttgtctttgaggctgcagaccgttttttgtttgcggtccagccctctgcctacgcgacgtcgaggtaggtcgcgcgttcgattctcgcgtaggtccacatattttgctgattcttcgccaattgcgccaccgtcgccatcacatcgtcatgcagcggaatacaaaccaaccatggatctcggtgcttctagatacaaggcgctacgattgttactcgccgccttccggagctcaagtaagacgtaggacatggacaagcgactggtcatagatcgacgttgtctggtcgctgccagccgtgcccccatctttcaatgatacctcacaccagacggtgactaagtattgcgcgtatcatagacggctccgaaatttgtatcttaaacgaaaattgcacctaccttacaggaggttcgcggctatccgcctttatttctctgcgaagatgtttcagattcagaacgatgggctgcagtcatcgtgaaccgaaggattaggtacagatcagctccccgagttcgcctgctctaagagtttgagcatcaacaatgggatattgaactcgtaaatccctgtctgtgtgattcgtactcttggcagcaggttctcatgaagacggggagagttcgaggtagttttataccgccggaagatccctctctggcacgatttccccgtcatgggatcgacgacaggttcaaatcccctggaacagaatgcgacaatgcagagcctggagcttcacggctcgatccatcgtgcttgatctcgtccggataaaggctacgagaagccatagacaattagtcgatcgtaaaagcatcgcgggcgcaaggcaataactctctacggtgggtgccttcgggcaatcccgaagccgagactcgtcgtcaaccgcatcgacccagagcagcaacgaatatgaccatgacgtttgatttcgtaccaggttgagctacctatgccttgttacgatctagaatacacctgccaaacagaatcagccggctaagtatgggagcagaatgggcaatgtctcgtccctcgctcgagcgtgagttggcatgagggctggctgacggagaattccacggcgggctgatcatcaaacccggaatctctacgtagatcgagtgctctggattcttacgtcgccgagctcggaagcgacatctcgtatgaaaagaggtgagtacagactgggccgttcaaatgcttcgtgtacctgatctcttgtctgcagtttgtcatcgtcgcgattcttgaagactatcctcattcgtcacaactatggattgctcgtgctcaagctgttcatcaagccggacccgtacatgtccctccgggtcattcagcgtcgtcttaaacgtgagcctatttccggactccctccgttctgcttggtgttgctgatgctcgtaccctcggctcagatcaacgcgactcgttgacggacctaccaaacgttctgacctacgctacctttgtggagacggaaaaggcgggatatcttataaggcagtatgctggagcgagtctgtacgatcggatcaggtcagtcatagccctccttatcgctttttgcccttcttgcatagatgacctactggaataccttgcattataaagcacccggccttacctttcaccggtggagaagaaatggatcagtttccagatcctgagtgcgatgagagacgctagggccagagaagtgagtcattcatcttgatactttccgaaaactgagctcatgtgtctgatcgtccgcgacgtagataacacacggcgatctcaaatcggaaaacgttctcatcactccggcgttgacggtcctcattaccgactttgcgtctgccttcaagcccacctttcttcccctcaacgatccctcagacttttcctacttctacgactcgtctggccggcggacgtgctatatcgctccagagaggttctacgccgacgatagtcggatcgccgaggagaagaggcaggctatcgcatccgtcacggcggaggggacgggctcctggctgaacgcagggatcggcaagagggatggcaaggtcaccgagcagatggacgtcttcgccgccggatgtgtactgctggagatgtggacagatggagcaagcatctttactctgagcgagctgtacgggtatcgcgagggcaaataccatgagttggaagggatcttaggcagcctggaagattcatctgttagggtgagtcacagtgtcgcagcttgagtggaccgagtgtttaccatgagtcttgcgcttcaacaggctctgatcgcaagcatgattgctttagaagcggatcaccgaccgacattcgaaaaagcgttatcggatttccgcaatacggtctttcccgactacttttacacgttcatgaacgactacgtggtcaatcttgcggcagatcatcatgtgcccaacagcacgatgacgaatgatcctatcgcccgtagctacggacaggcggactcgataatcaccggaatctgccgagattgggatggtatgatcgcagcgatgatcgaagaacacgacctgtccgtgagccgtctttcggaagcggagcagaaagacgagaacgaccacttccagggcgaagatatcagtaagtactctacacaacgacgcttgagcttctggcggataaattttatctaaaatcgcgctttagacgctcccaccctcttgctgctcaatatcatcacgtcgaatatacggaactgcgttcgggaatcgtccaaggtcaatgctcttgaacccatccgccagatcgccaagcggctcacagccgacgagactatcgatcgggtcgtaccctacttagtctcgctcttcaaggatgaaagttcccaagtccgggcggcgtctttcgagcttcttgtggaacttgtgagtcaggtcagtgttatcgtcaggcgttcgaactaatagatatcgaattttctagtttcaggagctcgaagtcatctccgctcatcagaccggcatcatcaccgaatacatcctcccccacgttcgccagcttgcagaagacgaagacgtactggtccgtagcacatttgctaggagcttaccgatgttaagcgacattggtatgaacatcatggagatgagtcaagcactcaaggctgcagagattggtgctggtcagatggacattgatccggcattggaggtcagccaactcgccaaaggggatcgaaacggttgaagactgacacaaatcctaccccctgtagcctggatacgatgccaacatacaggaattggttgaagcatattccgagcaagcatcaacagtgctcgtggaccccaacagcgatgtcaggcgggcggccttggcagacgtggcacggctctgcttagctttcgggagaacaaaaacaaacgaggtattgctgagccggatgataacatacctgaacgataaggattggaaactccgacacgcgtttcttgaaaacatcgtcagcgtggccgcattcgtaggatccaccagcctagaagaattcgtcttgccgctcatggaacaggccttggccggtgcgtgatagcgccactgttaccgtagagtttggcctcacattgattgacctgcgtcgcagaccccgaagactttgtcgtcgccagggtactcgaatcgttggcgagccttactgagatacgcttattcgagaaggcgagaatgttagaattgttctcgaattgctacggtttcctgtgccacccgtctatctgggtgtcgcaaggtacgttgcttgcgggtcgaagcaacttgtcagttcgaacagagctaacgatttgtcaccgattagcggcagcatcttttgttgcagcagtctgcaagcagctttcgacaacggacatctcctgcttggtttatccttacgtccgacctcttcttcaggccgacgttgccgacatgacgagggagaatctgctcgactccgtacttccacctgtgagcccaatatgagatgaaatcagtcgatgccgggctgacggaatacaatggctagttacctcgtggcctcttggagggtgcgagagtatgggcaagccggaacctccgtggcacttggtggagcaaagcgaacattcccggccggaccgggaccaagcgaaaggctttccacatgagttcagtcccttccagcaaaacgctgcagacggtggatgagaagtcagtagaggcttcgctatgtcaagcctccatcgcctaatccatgctgcaatatagagacacacagcatctgacagagctacgtgccaggagtttggacgacgagcaagcaaagaaattcgtcagtctgcgggattacattgcgtctcaagctgcactggcccttgagtacgtagccgtgctatggttccccgctgtagatagttgacgagcgtcttgagcaggagagggcatctacaggaggcaaaagtttcatatacaactgggaagcaggcctcgcttcaggagctgaacgttacgccggtgactgtcttcttgactcccaagcagacggattcacaggtccatcccgccatagaaaagtttcgatcgccagctgcgagggctctctccgacgacagcaggcgctcttcattctctggtaacccttttcgacctcgacaagccagtcacacagccacaggaactgatgctgaccaccttgtggaattgcgtcgtaaactgaagcgtctggatgatgcacgaacgaattcgaaagacttgcaaatgacctcggcagcttctgctcagaacggaaccggcaacgatatcgtcagtgtcacgagcgcaggcgacctccctttccaacgagcattgtccaatgcatcggtaccttctaccttgcaagaccgctcgaacgggctattgtctactcgcagccggctatcattcgggcgggaaccagcgaaagcagctcccgcggtcagcgcaacgaacgagatcgtactcggtcagctcgaagccgctaccgcactgagcgctcaagagaatgtcagcgcaaattcaggcttaaccacgcctcgtcaacctactcgggaactgcatccaccaccaccagacatgttccagcctttcacgtctacctacgaaggccatgatccaaacgtcatggcgttgttggacaggacatatgccgagaacactccgatcagcctttcacatctaggacctataatcgaacgggggaatgccttgaggcgcggtgcaccaaccagaacgaagcagccctcgcgatctagcgaccatccagcgtcactcgtggcgcatctatcggctcatcagtctcctattctcgccctcttgagccccccggatcagtcatatcttgtctcggccgaccgcagcggcatggtttgtgtctgggacgtagcgcgttttgaaaggagcgtctccaacaaaccccgccttacgcatcgcctggaagatggcaaactttccgcagcatgtccgatagtaaaccggtcggcatttgcattcgctctctccagcggctccattcagctcttgcgggtcagcaatgcatcgagcggctctctgaaacaggcccgattgctgcctgtccagagcctagcttatccgccagatcagggtgaggccatctatatccagaacgtgtatcaaggtaggtcggtctacgagataccagctagtcgatctgagcgctaatggcacttatggcattctcagccgaggagtctgaccttctatacgttaccaacctgggtcacatttctctaatcagcatcagattgggaacaaccaagtggacggcttcgcagccgatagtgttgggcaggccgaccgcttgttatctggattccaagcaactctggctacttataggaaccagctccggcagtctggcactatgggatctgcgatacggtctaatggttcgccattggcaaatctcgcaaactagtatagaagtcatcgctcctcatcccgctcgtgggaaggggaaatgggtggttgttgcgtctcaggccacaccttcagatcgatccgagattgagaccgccacgataatggtctcagtcgacctgagtaacggggaagtcgtcgaaagatttcaaactacctcgtcaacatcctccacagctcccgccggattggaaaacgacgagggttaccaagcctatctgaattcggactcgactctggacagtccggctcgggcagtggaagcgatactcaccagcagaaaagacaccgagtcattaaaaatgcttaaaaccgccgacgtgcagaatagtgcggcatcgacggtccgagcgatacatgccgtggagatctcccccggcgatacatccttcagcaataatacggatctgagtcctgtgcacgaatcgttcgatgtgtctcacggacaggaaagacacacgcaattgcctggcggtttcattctcacagtcagccgtgatcgaatcgtaaggctttggaatttgggtcaccctgctcagagcttggtggtatcaggcgcgggcagagacgcaaacaagcggtacaggtgcggaagattggcagtggccaattcgacactatcaccgaactgatccgcgtgccgtcgttttcagacatatccagcaatctgacggagtaacgacatacgtcgaatcgccacatcgtccttctgaggctcggctaccccagtccagagtttcgagaaaactagcagaggaacaacaaagcaaccctcaaccaagtggtaattccactgccaacgtaacgaggccgcatctacacgagtgcacggcggtcctcacattcaccactccattctcaaatgctcttatgatcgcaaccgctgatgcaggaggtgtcgtcaaagtatggaaggtcgaaggctagactgttctgaaaggtcaccagcatttatgagttgttttgtggcgtctagatgagctccgttgttacaagttgtgttggggatctagtcatcattgatgtatcgtaattcttcataaaagtcttcattgtgctttctcggtctgatttcattagcggcggcttttcctcaaagaagagtcctcgccgttgtacaacatccatttcccgtcgggctttctgtaagcgggaattgaatcagttctatatctgcattggggaaaattggagaaattccacgcgaacagtactgactctgcttcttgttgtcgtttcgctcgtttcgctctgaccatctcgtcagcttcagcattttgccgctctacagcctgagttgatggcatgccgggttccctacattcgttcaccatgatcagtggagtcatcctcgtgtcgcgagcaaatatggctcaccagtagcctggaggagttgggttcttttcgtgctgatcgcaggaatcggcagtcagcgataaaaccgtctcgtcctcccgatgagaactcctcacctcaactttgtgtcgagaaactgtgttcatgagtttctgtttctgggccaaggcgagctcttcgtggtcttcgtctatcaattgatcgggcgtagatgactgtcttccgaagcgtatgccattgtcgacttgtatgtcccgcgtcgcttcgtaccactatcgtgacgtcgctttaacggtgcgatcaagagatgacaatgcccgcactgcatgcttacgttttcacactcgtcgcaggcctctccgtgcatacaccgcctttgctccttactccgctgaacactgtgataggtgtatgtcttgccttggttgcgttccggattgacaacatagatttcttctcgatcagcgttttcttcaagtctccgcgaactacaagagcaaaatagcatgtgcgtttagtgcgagagatggaaccgatgtccaggtcatactcaccttgtcaccgtcaacttctgccttttctctaagcgagcaggcgtatccacgagacttgccgcaggaatatcgggctgcaacatttgttttcgcttaagtgacgcattagccgctcttgtcggcgtgtggtgttcttgctttgcttggtcgataagcctactcatcgagccaggtaacttggacgtgcttgcagccgagaccgctgcggaaggcctgactgaagccatcctaggcagggtgtgaaccgtttcgctttgaatcttgatccgtgcgttcgctcctacctcgtcttcgaatgaatcgcggcgggtcattttggttttctccccgcctagccattgcattccactcggtgtgcgggtcacgcgtgatttggttctatccgccgaggcgacttgcctggatggccccgacactggcgtctcaatggcttgacggggtaccgaaacggtcgcttgaaccgaacgggagctggcccgaccgataacaggtgtgagtgatccagtcgtgcgagattgcggcgtatccactaccattgtccccctagctctccgccgagctgccggctgtactgtagcgccggtttccactcgacgcagtaagctctggtctgagcgtcttctgaggttggcttcagtgggaccttcgtcttcttcggtcgtggtaccggccacgtcctcatgatgattttcgatcctttcagaatttccggctggaatgtcgagcacctgctctgccatagtcctctcccgctcctcggtcccggagctagacgtcttcccgtcgtcttttccttcgattggtataggtctgcctcggtgtgccgaggggctggctgcctgtcgagtctcggcaaagacgtccggaaggactgcgtctcgagcttgatcgggtatcatccgtgagcgattatattgcaggtcggccttgcgagtcgagtcctcccgtaatcgatcggtgtgtatttctgcgagtccttccaggtccatctcacgtttgatgctgacggtgtcctcgacgtcttgcgatccgggagggaaaattgatctcaacggggcgcgattgctgctcgttcctgactccttctttgatgatggccccgcctttcccgatcgcatcttgtcctgcgaattttcatcacctcccttccggtctgcttgtccaatcttcgtcgcggccctcttctccttttcccgcctcaacgctgctttaagcttatgtatctcggcatcgaggccattcttcatcccgacccagcgcttcgcatcgtctttcctactctgctcgagcttgttgtacgcttcgaggaggacttcgtactgtgtttgcaaatgtgcaacttgaggacgggaagcaaagctcgagtgcggtctatgtatccttgttcgagacgtagcgttgacctgtcagaccttgtatccggtgcggctaatcttggaatgactcactcgctagctgttgccattgcatttttcgcatttttcagccctttcagcccttccaattcatctagagtctgtcgatggtcggcattgatctcctccagctctctttccaagtcgtaaatccgggtccgattcgcttcatccgccgaaaccaagttggcacaggtcaactggagctcttcgttctcagcaacgagcgtcgagtaggcctcctcgagagattgaatttcgctctcgaagatttgattcttcgcctgcaaggtacggtactatcagagaggtcatgtatagatttcgtcagcgatccccctggatgcagttgaacaatatgaacagttttgtattcacctctctagccagttctgattgcgggtcaaaggcagggttcagcggaaagatcaactcgatggccgattatgatcggctctctgtctgaaatatctcacctttcctagccaccaaggcattgtgctcctcccgctcgtattttgagagcgggctcagagataactcacgaggcatcgacatctcgcctctggcaggtatccgcacacttccagctgttttcacctagaaggtatcgccgggatccctgatagacaagtcttgaagtgctcggccaggcgtgtaactttccctgagttacttaggatccaaacaatgtgctgacgatgaatataacggaaccatgctgcttcaactagcaagtctgacccgtttcgctcatgtccgctcacctaaatgtcgaccttgatgttacgcgacccccgatcgcgtcagatcgacatgatcgtggacctgttcgtccgtgggtattccgggattgtacacacgcacacactaaagcttgaggctggtcagctataggccttgacctgatacacgaggtaagctcggtgttctctttgatctagagaagtggatcgtcactcgatgaaagagtggactatacctttcacgtgatcgtgatttggctgattgcaacttgatgatgggcatatccgaatcgtaaacaaacccataacaaccgcgacccaggaaacttggtcgatgatgacctagagtgcgtaactccatactctgtcatctctgcaacctcttccacccacgacacccgcctggatatagcgtagtgctgaatccctgccggaaatcgaattaccggcatcgagccctcaaaacactgcaatcagtccaaacaaacaagcgaatagacgggatcataacattcaactcgtgtcactcttcttgaagcccttactcgtccattgccaaatacattatggaggacccgcattctgaagcagaaaccacccggatcgtcgtcgagaccaaggaactgtgggatcgcgccgagaagaacgtcagggacgaagcggaaaagatcatgcagtctcgactgaccatgctagatgccgatgacccgacgggcaagaaccttgctctcaagagggagatcaagattcgagtacaaaatgtgagtctgccgtcaattctggctatgacgcttatattccaaatcgcgaaaagctgagtacattgggtctggtaccgcaacgattggcaatagattatgaatcaggcattcaaatcgacagcccggaacctccaagtcaacggtatcgagttcgaaaaatggagtgaacgtgagtccgatcgagtctctgtggatcttggtgactgaaatctcatacaatacgtccccgctcctttcctcttgggctcgacctggccttacagatgtcgagcaatttgacgagaatctcgatcggaggctgcaagctctccgtcgggaacaagtagaatggagctcaattgtcgccgaacgaagacggaaagctccggatcaggccaaggggctcgaggataatctggagatgatgaaggaggccatggaatgggacatcgatgtcgatgaaaacggacgggccagggaggatgtcgacgctgaggatacggtggtcctgaaccctgagcgtgagtgacgaggctggaggtcttcgcgagaccagctctgactcacagtcttatacgacgttggatataggactaccaccacgacatgacgaaaccatcgagacctacaagaagacgctgaccaacctgaatgaggtgctgagcgtgagttacgaatcacctgacctttccataccccgcccctttcagcagcaagaaggctcctcctgctttgctctcgagtgcattcctttccgagcttccgactgacatgccttttgatcgtgattgttcctcgctacagaacacaccggaacagatagcgcgtgccgaacgagcaaaggcagtcagggagacggtcatgagtcttcccaaatgaacagggaacatcaaacggtcgttcttcgatgcaattcacttcataccagatggatcaccctttcgcgttggctcttcatgaccttccttcgattttcactatctttaccaacatcatactccctttcacgactcgtccgccgaactttacaaccacggacatctgtaatttagcatgagattcgacctcctcgtccgtcctatcggacataccattgtatgcgatacaacattttcttgcctatctctttcgtgatcagcccgccttccgttgtatttccgagagatgcttcgactggaaagtaacggagcggtgtcacgaggcttatcgtctcctcatgactcgtctggttgacgtgctcgtccagctacaggcagacgacactgcacaaggcattcgatagggaacatttcgattcgatgggatagtgatagcgactaggaggctcgatcctcctttgtctacctggctgtgtcgtgttgaagcagttcagggtaaatcgggaaaggaagccaggaggataatttctacgattcgatggcgcgacagatacgagcagagtagccctgctttgagaagctgttctgcgataggcagtagtcaccagcaggacgaggtcaccgggaagacgtatatatagactgggattcgagaagccattcgaacgtactatgacacgaactacgccgactccgcttgaaagtaagccttcgacaacgctctccagaagcacctgggtagattcgcagaagactatcgtcggaacgagaaacgagttcgatggactgtcgtccatccaaattacatcgaagcgtttcagctaccattagcaagtctgaacctcggtatgaacagtactaccctttcccgcctacatcgttctcaacggtatatcccagactgagtctccgcagctatgtcagttgtcctgcgggataccctcctacactggcgacatcttctcctccatcatctcattacgagcgaaggccgatctatgctacacctcatgggacttacccgaacgcgatgcctgtagcttcttcagctgagcctcctcctaccatcggatacggccaaccaagacaccccgtcatgcccaaaccaggtcggtaatagagtccctctcgattcggctttgcaacttacggctgatcctccacatgtttgcctgttagaccctagaagattttgcttcgccgtgggacgagcctgggtcccatatgctctgtacgaagagccccgctcggccacttgagcctgagcgggtcggatcgatgtcatcggaactgagaggtgtaggcatgaacgcggtattgtggacgcctggtctcgagcaatgcagtctgcatacaacgcaagactccctgaggactaaggtccttccgatcggagaaagcgacatatcgtcaaatcggatgcagggatataggcttctgatcgacctgacccaaacggagccgatacgtgctgatagctgatatgctgtggtcgcgaggcgtatccattgactcattcctttcgtatggtctcgtatggtcagttgtgaggaggcctcgattcgtttgcgcgggtaacgatatgacaaaaagatgattatggctgaggctgagaattgaacgcatgtttcatggtcgatctcgcgggacctcgacctaggtcttggggaactcttcgacacaaaaagcactgtagggaagcccacagcagcgagagtgcaaaaagttctaagcgaacttccccccttcaatcaagtcatgccccaccctgcaggcttcactaggaagcaaggtagtaggtctgtacccaattgaggagttgcttaacttctggtctcctgatttagggtactaccccttaaccactacaccattgtactcgccattgagggtttctgaatttagttgtacttgacgcctcgcgcgcgaaagcctcgtttacgtgaagggcctcggcgcgaggcacttctagcctttcgagtatccgtgcctgcctggatttcgactcctgttactactacgccttgtgctgggtcaattagatggaaatcttctacctagagatacttagatcatcgcattgccagcggacgaaaaggcgttggaatcccgattcgaaatcgttcgattgcggcgcagcctagcgagccgcctactctgagaccttcgattccatagtatgacatttcttcaaccttcggtttcttgttcgatcgaggctgggttgggcatatatcatctagctctatcagaacaggttgtcgagtccgcatattcaggaagtcatgacccgaacccgtcgagggcggcaccacgctagatcttctgccaggcgtactcgaactgttcccgccctttcgacttggagcatatcatctcggccaagatagaatcatgcagtcaaccagtcccgaacaaattctcgtctgattcgagcaccggtgaatgctgaaaaccgtcaaaactcggacggcggccatgttcggccccggccccgcctcgactcggcaaagtcctgcgtttcggcttcgtgctcggctccgcttcgatcgcgccggcttgccgccgaaagttgccctccgcgggctgaaatgactcgacgaggtgggcctggatggaagatgctcggctctggcggggtcttgggcaaatgaggagtatctggtcgttccgtgtcggttcgtgcgacccgctgcgatagcctggggcaagattctgggcgtggcttggctttggcttggttctgcaagtatccccaaagtttcgcctgcgtagcttcatcgactgccgcagcaggttccgtgacctttgggttcttcgcttgtacctatgaaacttccttctctcgcgaggtgtacgaccaccccctctgttcaaagtcttctcgttcgatcgtctgaatcgggatgaaacgggaacgacgagtaacaaagggccaaagacgaggtcgcgaaatctgacgtcacggcgagttccggccgcaacgagacgagtcgagtcgagacgtaatcaaattcccggatgaatagcggggggtgtcgagatgccgccggcgcgccaagagacgaagcggattcacgtgtttggaaccggtgtctcctgcgccttgccgtctcgcgagctatcgtgcccaccatcgctcaagcgcgctctgcctttccaagccacggggccaaggcttgatgtgttgatccccgtgactttttgatgacgaattctctcgaaatttcgctttaacacttgggatcgacgacgacgacgtttcgtaacgagttacctccgcctttttgccccttggtaacgaagccgcagtccgtctgggcgatcgccaccggtacgacgtcgatcctggtcttgggtgaatctcctttgacgagagagttgcctgatcaagacgcaggcaaagcaccaggcgagcggggcggatatgacgaaatcgatgacgccccccgaccagcccaggatgatttttcgtctcggctgacgtactggtcgtcacccgccccctttgtcggaccatcactgcagagagtcttatttcgtggatctgtatataatccacacccatctgcgatccacaaccatgtgcagggtttgtcgttccgtcatattttgaaaacaaccacgcactttatcgagttcatcaattgacaacttcgcctacgaaacgtaaacaacaacaataatggctgtgtaagtcccatcccgactcgatctgcttgttcactcagagccgctgtcgctgacctctacgccattctcgacagtctgaccaccgtgaagaacctcgtcctcggactcctcctcgcctgtgccttttcctccttcatcctctcgatcatctgtacgtcagctccgtcccgcacagcgttaccagcccgaatcggctcgctgatcacaatatcctttctcgtttaacagacactaacaggcagatcgcagagaatgtcggttacaaccccgccgtgatcgcctttttggtcgtcggtatcgtccgtaagtcccttgcccccgctttgatcatcgaggacgagggcgacggctgaccaagctcgtccacactctccacagagaccttgtacatcgtcttccagctggctactcgacagaggggtgctatcaacaagaccgccattccctttggcattcacaccttggtcaccctttaccacctcggaatcgccatcacgctgaccgtcaagcgttacgacgcccctcactactgccccgccgggatcatccgtcaggttaccgagtgtttcggtctttacaaggccttgatcgccatctcctggatcgactttgcgttgaacctcatctaccttgctttgctcgccatggctgccaggaagtacggcgggttcagcaccccggagggactcttgtaccctgccgaggacttggagaggagggccgtcgccgacaaggctggacactagacgcgatggtcgacgtgttgcgctctggaggcatatgatggtgatgatggatctccgaccggggttgggtcaatcacgaatagcaaacccgggggttggggatcatatcatgggttgagagaagggaaagatttagattatcggcaactgtatcaactagatcataattcgagcgagtctcttgggtccgctgtcgcgtaggacgagctggacgccggggatcccgcctcgtcacaaacaattataatgcatcattacgaaccgtacacatcttccgagttgcgagcgtgctatattcgacaacatcagcgtctttacagaagagcagtcgttttggtcgaccgagaaaaggacacccaaaatcatcacttttgggttaaatttcgcaccatgatgcagcagtacgtaccctcgacttcatcgacatgacgagttgcagcagtttgtaatctcccagagagtcaaattttgtcggctcaaattcatcgatgcgatatcaactggacggggcttgtggatgatttccgatcgatcgtcctcagctcaacatcatcgccactcatccgcggttcgggttggggtttcatcctcgaaggggtcgatacactcggtcaaatcgcataagtctgagcgggatttggcggagttatgcgatctgacagacgtgtcctggatttgtttactttgtgactctgacgtgagtctcgtcgcgtctcgcgttcgtcatcccaaggaccacctagtcgcgcagagaaagagaatcgtataagacaaccaggtcaattcccgttcacttcaacctcttctctctcttgattacgtctcaaaccaacttactcctataacttcaatcgcctcctgtcttcttaacaccaacactcaacctccatcaactctcaccacaatggcccgaaccaagcaaactgcccgaaagtctaccggaggaaaggcgtaagtcgatctcgccatcgatgtgtctcgtcgcttcatcgtctgaccacgttcgccgtctatccctttagtccccgaaagcagctcgcctccaaggctgccaagaagcaggctccttccactggaggagtcaagaagccccacaggtacaggcccggaaccgtcgctctccgtacgtcttcttaacgtgactagccttctatagctatcgtctcatactcataccctcccgacttgatctcctataggtgagatccgaaagtaccagaagtctaccgaactcctcatcaggaagttgcccttccagcgactcgtccgaggtcagtcgcgtcgcgttacttcttcaccttccgcccatcgagactaatttcgtactcgaccttcattgccgtctcatcacacacaacgcagagatcgctcaggacttcaagactgacctccgattccagtcgtcggctgttatggctttgcaggaagcctccgaggcttacctcgtcagcttgttcgagggtgagtttaataagtgctcgacatgtttctcttgggcttgctaacccctcgccgttcgatcagacaccaacctctgtgctattcacgccaagcgtgttactatccagcccaaggacatgcaactcgcccgaaggctccgaggagagagggcttaggtccactcttagatcatcacctcttgacatgatcggctagcttcgcaccttttacaccacttcacgactctttttttcgccaccacccgccctctaatccctgacccgacacacgcccgcatttgacttcgctctcattcaaatttcactaccgaccgcctccttcggtgaacttaggggaactcaacgggccttgatcacgtccatcccccgagcccatcgaggccgagctgcagagtcgaaccccaccccaacatttcacaatccgcccctaaccacctcggtaatcctcttttaatcgtcgtcttctgttttctttttacgagattgtatccatacttttgtttatgatcttttatcggatgacgacgagatttttttttatcgccacttgccgccttcgggattgctgcaaattgtctgatcaagcttcgggacgttccaagctgagggttggtttctgattgcgctgaccgccgagcccaacgatcataaagctttcgcgataataaggtggtgatcaggttgcaaaatctatgcataggccgaggcatcttcctctggcatcaacaggagctgactagaaccatcccaactagtctgcgcacgacgaaaggggcctgctatagtttctctcatatgaaagtcagatccgggtctatatacaaggaggacggcacgaagacgattgtttatgtacggtactgtaaatgagtatacagatgggtcagcttcgacttcgacactcgatgccgatcttaaggaccactccggactcacgtccccgttgatggtcacatattcctataccaacaagcaaccacgaccatcagcccgctaacccagacagcccacccggtcaacccctcacgccacggacgactcgactcacatgactgaaatcgcaggtccaatacttggcccgctccccatcctcgacaccgagatcgaccaagacctcgaggtcctcttccgcgaggatctcgctcgctcgtttctcgtcgatattggattcgggttctccgttgactagcaacctgagcggggccgggttggaggacgcggtgggagggataaaggagaccgagaccgacgtaggggagatggttccttcggggacgtcggtgtagccgctaaagagagggacaagccgggcagagcagagagttttgagtgggtttgataggccaaggaatgaagcagctgtaggacttacacggcgcaaaggattcgtccccaattggcgtctacccagtcatgaaaccgatcgcatcaagtgagcaccagggttcatgtagcatgtgcagttctcgctcctcgactcaccttcaccgtaaagcgccgtcttgaccaacgacgaggtagcaactgacgaggcgaccttcctggcgacgtcatacgagggtgcgttctacccgatacgaacgtcgagtgttcaagatacgatgagcaccaccgaccacaacaccgttacacacagcgacgtagcataacgcacctcgacccggacggtgacgaatttagtggcgccctctccgtccctgacgacgagctgagcgagttcctctgcgaacaccgtcaactcgcgtttgaacgtctcgtacgcctgtggatcccctcgttcggtgatcggttctcccttcatcccggcaccgttggcgagacagaggatggtatcgttcgtgctcatatccccatccaccgagatcgagttgaacgaccggtccacggcgtgtgtcagggcggattggagcgctccggggtggatgttggcatcggtagcgatgacacccaatagagttccatgagggggtcccatgttaggatggatcatccccgctcccttgtcgatccctacaatcctgaccgtctggtccccgagcttgaactctttcgctcggagtttgggaaacgtgtcggtcgtcatgaacgccttggccagtccgagccatgcggaggaggatgacgagaggttggagacgaggtcggggatggaagaggtgattttgttgatgggcaagtgttgaccgatcacaccggtcgacatgaccaatgtctctcccgcctgctcgtcacccttgacgtgctcgctgatcaactcgctcatcttccaagcgtcctccagtcccttggtccccgtaactgcattggcgcatccggaattgacgacaaatcctttaaccttgccctggtgtcgtttcaagatctcgttcgagacctggacgggagccgccttgaacacgtttcgggtgaaacacgctgcggccgaacaagcttgctccgaggtggagacgaggacacctaggtcgaggacgccggatttcttcttgatcccgcagtgcgacgaggcgacttggtatcctcgagggaacgccgaatcgtcatacttggtcacgaggtgagacttgtccggggtcggtttgctagccatcgaccgggtgaggctcggggtgatggttcgccatgtcgagcgtagttgatggggtgagcggagggacgaccgaagtgtcgaaatcatcttgcttggttagaattcgatgaaatgcctgtactggtggtcacaatagtgtagtgcatgccacggtgaagaaaaggtggatgagcgatattccttatctcgcaactcgctagttgaacgattctctactcgcctgatgatgagcgagtccaagtttcgaacgacgttggctccggctcgaatatgcgatagctctgggagacgactgtagagtagatgtttgaccacactgcttgatctcctggatatgtccgttgcaggtcgacgacgacgttgacgacgatggacaagttgatgttgatgattgaccttgctgcgctgctgtgatgtgactcgtttcgttccccggaccaaaaagtggaggccaggtcaagagaggtcgacatgggaggacaagtacaagtgtaacatctcgcatctcatcgggcctccccttcaaactcgtatcacacgagatataccagtcaagacaatgctcttccgtcattcagctgtcctacgcaggacgtccacgcaccggccgatctcgtcgagatccatctcatcccggcccctccgcctggccatcatcggcgccggtccgtcaggattctatacggcatccaagatcctgcaaaccttgcctatcggttcggaacatggagatcaggtcgaagtccacatgtacgacaggctacctacgccgtatggtttggcgaggtacggcgtcgccccggatcatcccgaggtcaaggtgcgtctaggtcgaggttgattgggcatgcgactccgtacgtattgcggtgcggtgcgggcgagtcgacgtcgtacacccatcaaacagcttgcacgcccagatcccatagctgatcacgatttgttactaccactcttcgactcacagaactgtcaacacaaattcgacgagctcgccacggaccctcgatttcgattcttcggcaacgtctgtataggcaattcgacttcccccctccctggcggtccatcctatacctaccccgacgcattgcacctacccctgacctcactctatccgtattacaacaccttgctcttctcttacggctcttcccactcgacccctctacccaacacgcccggctcgtgcgcctcgtccgatcggttggaaaacgtcttccccgcgctggcgtttgtgaactggtacaacggccaccctgcttatacccatctggcgcctgatctgagcggggagaccgtcaccgtcgtcggacacggtaacgtcgctgtggactgtgcgaggatcttgttgaaaccgccctcagagtttgtcgggacggacatgcctaccccgatcatcgagcacttgagaaagagccgggtgaagcgggtcgaggtcgtcgggaggcgtgggccggcacaggtagccttcacgaccaaggagtttagggagatggtcaacctcgaggggattcggtatcagcccgtcaagggggaaatgatggatcaggccaaggagatggtcaagggtgatcgagcgaggacgaggttattagacctcatggccaaggggggcaagaccaagcccagttcgacgacgatgacgacaatgtcggaggataaagagtttcaactcgggttcctcctatcacccaaagccttcctctcggaccctacccgacctgataaagtaggctcggtccgctgggcacgcaacgccctgctagctcaaccttccgtcccgcaaggtcccgcacccgatccacccgccgctcctccctcggaacgtccggcgagcagctcggtcctcgcccgtccgaccggagaagagtacgcagcgcccacggggatgatcattgagagcgttgggtatcggggggaaccgatctgggagggtgagactgttcagggggatactggtggggttccgtttgatagggcaagggcgagggtgatgaacctcgagggtagggtgacggatgggagcggggtgatggtgagtaggacgctcgtcgatcttgccagagggagacgaactaatagggtaattatcggtcactctcagatccccggaatgtacacggcggggtggatcgcgagcgggcctatcggggtcatcgcttcgactatgcaacgggcctatgccgtagcctcgacgatcctgaccgatcactaccagtccccgccattgggagcgtcttctatcttgtgtcccgagcctcaactaggtgggaccccagactttatcacatcgtcgactagacgggtggtcgagttgagcgattggaaacggatagacgaggccgaggtcgagcgtggtgcggcagagggcaaacccagggaaaagtttgtgtcgatacgggagatgttgaaggtgctggattgagatgtgatcgaaacgttcatcttgatcttggctacgtgtttctgctgcatgatgacctcgtatgcaccataacgagaccattgcatctcatcatcatcgacatcgcttcggaagtaaatttcaatttgaatatgcttccggatcttgacctagcttgcgggaatgagcgggcgatgattgggatcatggcaagttagcaaagcagtcgacatgatcatgaaatatacgaccacatcatcatcaccgattcaggataccatctagacatcaccttcaagactatagcagcttctgtgtggattgccgagctcgcccaagctctacctcgctgcgtgggggcgcaacgctcgaatccggcctgggcaagcgggctggctcttccgaacaaaaaggagcaaccctaccgacgaagatctttacatcatccacttgatcgctgtactcgaatgttactgtgacagtatgtcttgactcgctcgttcgaactgtcgataatcataactttaacaaccccccatcaaggtcgatatcagcccacatactagtacatcaacatccgagtgagttcgcttcacaagcttagtccagcctcagcatccccagacaagcattgaaaaagttcgaaacgattgtagatcatctaagactatctgactatcgacgtttacgaatggagtctccgatttccttctcttcgagattgtgacggaacccacccagattacattccggaaggacgtaagggtcctcgaggaaactcgcccatcaacgcaacttgcaaggggacaacctcacatcgccttcacatccacacacagcatacagggacaccaagaacccccaagcgattcgccactcgaagagactccttgtactgtgtctgtataccctttcgaccaggatctgaccgaccttctcggccagctccgatgatcccctccaacgccctcgcccgtcgacggccatcccgacaaagagttttcgagggggacgaacccgtgttgaaacctatccctcctttccctaaccctttcctcggcgaggtggaggatatgaatgcggccgacgaattccaacgcaaagaaaaggtccgcaagcgctcggcagaaggtggttatcattcaaagtcgaccgcggccacaaacaaaacaaacaattcgagcgggagttccggttcgaattctacctctcgacctgtcatcgatggtcataccgccaccagatcgaccagaaagaagaggggacgatcgaagggagtgattagcatctcttcgagtgaagaggatgatgggttcgagctcatcgaggtccgtctgagcgatcgtgcggaggcggcttctggagcgggaaggagtggagcaggcgcgaacggtctgacagcgcaagaggacaaggacaataaagtcgatggatcgaaagataatcatgaagatcgagtgcagatgggctttcagcgagaagtccgagacgagtgggccggcaccgggcgacatccggacgtacgtaacgatgcaggtcgtgcgggcgtcatcatacctggcgaaagagaagaaggcgaggccgggacttttaagactatgaagctcgtcgaagaggtcaagaacgagaatacatcgaaacgtgcagcggtcgattcgaaacggaacgaccaaagaaacgcccaggacaacaagggcgatggagttgcatcggaaggcaaggacgtgctagaggttgcagatgaagcgatggaagtagatgacgacgagggcgacttttggaatcatatcccacaagaactctgggacggggcgcgaccttccgatcgtaaagcgatgtcccctcaagctcaagctcaacttcaacctgggcgcctgttgaccatggccgatatccccgacatcatctctctcgtcacgtctctcatccctgatgtctgtccagatcacctcagaggagtcatcgagggtcaaatcttccaagatccagcttgtcaaatttcggccgaagacgcatgcggagaggtcgtggcccatctcttcgatacgaatctcgctcggtacccgaaactcaacaaggaaaagaaacgcaaggcagaggatgaggcgggaccttcggtctcaaagcagacgaagagagtcaggacggatgacggcacggaagacaacgagaccgaatatctcgccagcggtcgcgtcaattacaggagcgaaaagatcgagttggacgagcggaaaggatgggcttataacaagggggcgactaaagatctgctcaacctcttcccgctcatgacccaaaagcagtaagatcttgccttcgacatgcttgattctccccgctcttgtcgctgaatcgtagacggtcattattccagcatcacggagaaacttcaattccacctcggactgtacgtcccgacatacttcgacttggcgtttcagtatacgcttccagagaaacaacgaccctggcgtgccatgaaggcgcctcgtgaagtcgatcccgccaagcccgataacagcaaagcgaaaggcaagcgagtcaagaacttcgaggccggagcagctgcatttgctgaagagagggaatttttggtaaacttgcttcgtgagtcgcatccatgatgatcagtcgggtaaggttcgatccaatagttatgacactgcccacagttgagatcgccgataaacctagtatcgaggcggtcaagacattacaaccgctcccggacgaaggcaacacagagtgccagtgctgttttggtgatgaccatttggtgagctgggcactcggtcgatctctattcgcggatcccaatgaaccaagttgcggcgattatacaggtttacatgatccactgtcgagatggacacctgttctgcagagactgctgcgctcgcttgctggagacggccttgggagatcaaaaagcggtgagtggctgttcatcaatgattgggcagttcgacttgtgctaaaactctcaatctgtcagccggtacattgtatgcacgaaagcgggtgccaggccgaattcgccgagcgcgatgtgaaaaaggttcttgtaccaaaggtggcaaacagttaccttgccctcgttcaacggaaagagttggaagctgccggtctggagaatctcgagacttgcccatcgtgcgagtttgccatcgtcattgaaaacgacaacgagaagctctttacctgtcaacatccacactgtgaaaccgtgtcctgtcccggctgcaagaaaccggtcggtcggagcgagtctttcgaaacgtagcagtggctgacggaagttgactggacagaatcacattccaaaatcgtgcgctgaagtcgcagccgaggacgagcatctgaacgaaaggcataccattgaagaggcgatgacacaggcaagctttgggttgtttcgggttcttcaagattttatcgctcatcgctccgctccaccaacaggctctggtccgaaagtgtccgaaagcatcgtgtcagaaacccttcctgaaagagtccgggtgtaataagatcacttggtaagcaccttttctgcatccagcgaagatctagggcactgagaacatagctcccggccgcagcatgtcatgccgaacggtctcttgttatatctgtagggcaatagtcaccgaaggttatgcccattttgatcggcgtgagtgctcgcatgcgaagatttctgcgtcgtccgaaaagctctgaaacccgctctcgctcggctaaccagctggtcatggaggaagcgcgaagaacccatgtaggctttgggaccctgtcaacgtagcggaactctatcaagccgaggtcagttccccaaaggatatgggatgcaggtcgacgttaacgacgatccgtctcgctcaggtcgctcaagctcggactcaggctcaagatcagatcatcaacgatgctgcccttgctggcagaaagatcgctcagcccgacctggaagtcgctttacctcagaataatgaagtgtttcgacccgcagttgtgccgggtgccaacccacgtcctgcacccatcccggcgcgacccgtgatcccggccataaggcagggaggggcagtcttaatagcgggtaatcgggatatagtagcgcgaatggatgtcatgcaagaagccttgcatgaacaacaagcagtattacagacaaatgccgcacagacgttcaatgcgatgcaggccagacgaatggaaatgatgcaaatcgaaatggacgcgctcaacaggctagctgaagtacaacgagccgcaatgggtggagtagctggaccatggccggttccatacccatttgctgcagtaccccccaacgtccgcttccaggagatgcccggcatgccgatccttccgcctctgcctcaacttcctcaacttcctcaacttcctcaacttcctcattatcctcaacttccccatcttcctcaacttaatcgccccgttcgaggtcgacaacgagctcaaagctgaagcatagcggacatggcaacaataacgacgaaaagacaaggccgagggatcacaacagtttgcttcaagacgatgacgaccatttttttcccacaaccacaagtgggcgggtgtttcgatgatcatcatgctgcgtctcgaaccgatgacatcagccctgccctttgggagcgattgtacgaatatacacgacatagtggtatgatgacgaaccgatgatgatcagcttgtattcgacgcacgccatgatatgacgacgtgtgagcctgaatcaaccatggtacgagacgtctcgagacgtctcgagcatttggagcatcgcttggcctttgaatccattgcagatcccgagctccaacgctgagtccaagcctgagacaggcggggaggctcaagtgtctcaaactccgccggctagaccgacggggtttaaatcgaaagtgaggaagaaaaacgtcgccctctcgatgccgaagccgaacggggcgttgccgacaggaccaggccggccgccggccacggccgccgaacctgctccaaagacggacggacaagtgaaaaagagccaagcccgtctcgcccggccgatcagccgctgattgcagccgacatcggccggctcctcggtgacctgtttgacggcctcggtctttgaggtacttaactccggagccgggttcgaggaattctttcccatgagtctcagaagcaacgcgtaccgagtctcgagatggacatgttgtgtctgccaatgttctagcctggtttctcggtgggtccaacctcagacctacgaaattcctgttcggtcccgacctcgcatcgtgcaagtattcgagattcacgatccggtggtgtttgatatctgtagagcccttgtgatttgtgacaaaacaaattcccacaaacgaccgctctcttcgttgagatgaccaaccattcccaatctaggtctcgttccgttgcagcttcgcagcaaatgggatcagagtttgaccggacagagaatagacgctggagaacgggggctgcgaggatgaacgggaggatattggcaagtgatctgctgcggtacaacctttgatctgacgacggaatggcgggtgatgtcatattaaagttccgctccgttcagtggcgtcgaggagttgtatcggagctaatccgcttggctggctccaccacggtaaggtaggcacccaaaccgctgaggctgtagaggctgttagttgttaacaggcgatcgtccggggcgtatacttaccgatcgccgatttcgagtctagatcagagacgtggagggccgcgacgaagggggcccggaagcgagacgcgtccatgctgttgacatcgggtttgacggcgctcgagcgtctaatctggctagtgggctgtgctgtgctcgccaagaggtcctatccgtatacaaggtgtgaaccgattaccagggcatgtggagggatgagaaagttccgaagtggaggattaggccttaccgacccagagttccccagatcgaccatgtcgagcgtcctagaggcacctcttgggatcctgcgaaacgatcgagtccccaagcctctgctggttacaaggaaaaggagccgcggctcgcaacgcccgcgggtctttcgcctacgatcgctacgaacgaatgcggcgggggggagacacctgctgggcgttttgggtcgtttttaatctgatcccgcgggtataatctctcgttgattccccggggttcgacgccagtcgcggtcgacagggaaaacgccacctcggcgaccagcccacgatccaccgacaatcagcctcgggaacattcacggcgaaccagctaaccatcggagaggtaccatcagcggacggcacgggcggcggaacggggagggcgatgatgagaaaaaagcctctcgacctcttttgatcatcgcatcgcttccttttcccctcgggcgagtagaagcgttgaccgatcaaagaccaaggagaaatagatatcctcgcgacccaacatcatcatcttggttccagccagtctcgaccatttcgacacgataaaacccacgacacacctctctacacgacttttgtcgagcatcgcattccaaacctccacatacttctcgcagggagctcggaaagagggtcacaccatcgaaagacggacgcattcgcagcgaaagctcgaccttataataccagacgacggcctctcatcgcaatagataattgggatacaccaggccagcttcttcggatcgttccccccaaccctgcacggctctcaaccacgaacatcacaccaccatcagtaccagctttaagagcactcgagagctcgaagcctggactgtacaagaaccatcgctcgttccgtgcacgcgtgacctagcttttcccttcaatacctcgcaactcgacctagcctggcgttctcgatttcgcctgacgatcgggaccaagggcaaccaaacaaacaagcaggaacgacccgcatcgacgatctacccgtcggaaactccaagctagcacagcaattcctatccagcacttgtcagagcaccggccctgtcctccacatcgaagggcagcaatacctctctctctgtggacaaagacgtgcgattttgatcccttctcggtcgccctccacattacgggacctccaccccggttggacgttcgagtaaacagcaagcacccttccccgcaaccaaccccaaagcacacaaggatccgaagctcggcatcacgagtcaccaccctcatcttcctcctttcgacctcttcccgccggctgagctcagcatctctgcccgttcggccacgcagagacgatctgcaaatatccacctagggcgtcatttcacggcaaagaaggagtcttggctcttggtatcgcccgtgccgacccatcggcgagcgagagttttagcgccaaaagcggctcctttttttcgttcaaagccaggtgagcccgcgcgagatccaggggcggaggggagggaggcaaggaggaagttggctcggaacgcaaattgcttccggggttcatcatcatcccctttccttctcatctaatctcgaatttgtcaaatcggtgctgactgaaagctaccaacctcatcgtcttgttagccggtcgacacctcgccacgtaaagtccacactcggtcccgggctttgatatatctatagcatcctctgctcttgtcaagagcattcacttggcccccgggaacctcggacctatctgattgcacttggccggaatccgacccagatcatacataagatcgacaccccagggtctgtggagcgcgcgcggcattccttgataaccgtttccaccattgcacctctttacaacacttcgacctcgacctttcttttgatctcactcaggaccaggtttgccttgctataccaggctaacgacatatattgcggctcgtcctacccacgacgatcaaacgtgtctccacccttggcctcttgcctagtgatcaggtgattcgtcatctctgaccgagggagctttggcgatttccgctagaaatttcaacccgcgcgctttcaacccacactagcgtaacccgcgctcgattcggtcatcaaccgtcgtcccttcatccggaccacctgagactatacatacaacgcatccttcaccacctcctccatcatctttcggttgcctccattcgagtgcgcctgaaaccgaacgttcttgaacgcaaacccaaagccatgtcgaccgcatcccccgtcgtgccgatggcaccaccttcatacgcccaggctgaaacgcaacaggcgcgtcatccgggccaacagccgcctcaagatcagcagcaccatcatccagcttcgacgacgtccgccttgaacgggttctaccaggctatccagcagaggcacggacaggctgatgggatgaccaaggatggcgaggtaagtcttgcgatctcgatcgtcatcaagttgtataggacgcgtcggttgaccatgacccatcccgctcggctcgcttgcagttggctcatcagacaatcaccaacgtctctctgttctcgccctggtccaactttggcgccccgggagtgcccaactacccgttcccctctccttcgctagggttcacgatcggtgatacctttgtcccctggtcagacgctgtcggtccgtcaggtctcacccctacgcccgggcaaaacgtaccgttgcaaggataccctatgcaggctatgcatcatcagctgcagggcaccgtcgggcgggatgatcaaacgttcaagcaagagtcccactttatgcccttccccatgaaaatggaggcgggagagaagcgtcaaggatccgtcgctgagctgcgcaaagaatcgacggggggggccggatcggtctctcgcgtggattcatcctcttcgggcgcttcggcagcttcggtcctcatggacggtaatgtcaggacacctacgcctttgttcaagaaccgagaacctctgcgctcgttcgactcgtccgggagttatttcacctaccctcggcctggaggtggcgatcagatgccctcgagctaccaaccccagatgtcgcagcaacagcataacggggaagcctcgcaacaggccgtccatccttcgcagttgttccatctgacccaaccgttccaatcgggttatgctcctaatcagtacatgagcgtcccgccgacgctgacgcagcatccgtcgcaccattcgtcctacatgcatcaacccgatcgtcaagactcgagagcttcgacctcttccgagatctcgagcatctcgccggccatgctcaactcgcgagcgccccgcacgggatccccagtctcgatgcacagcgacgatgcgcttcatcccatctcggctcagacgagccctcgttcacaggtccccttgcagttacccggttcgggcaacgctcggggtcatgctaccggccccgggtcgctgatcaacctgaaacggggatcggcaagctcgatgcacaccgacatcgatggtgacgacttggacccggatgatgacgaggccgacggggtcgagaagaacgggatgatgtgggggatgcccaccgctgcataccgatctctaagcgcgagggaaaggaaacgggtccgaaataggatcagcgcgaggacgtttagagctcggagaaaaggtgggttacggctccaagtacgcttgattggtcgatctctgcgctgatgcacgagtttgcgcttgttgtcacctcagaacacctgagcgttttggaacaagatttgaacgatcgcaactcgctcttaaaagcgtctcaagatgagatcaagcaattgcgagaagaaaatgctgagcgtgagttgattggcacgtcccgatgtctaccgtggtacacacgactgacgcggctgtcacatcctgctcatagtccgccgacgagtcgccatgttcgagagtggtcaacatcgctgacatgcgcaacgtgggaaacaacgaggaacatctaatattgtacaagcaaaaaggacgcatccgcaaaagtcaaacaagctcacgaatcgcattgccaccgggacaagaaaaagatattatcgaaatcggcaaaaaagggccaattctgcatcggtcacatgtactttgtctgaacgacccatgtgtacaaccatcgactcttcctctcactgcatgtcaagccaaagccgccttgtacgattgtatctatacagcatggtcattttattacgcgtttaacaaaggtccagtgtacaacgtttttcttcaagattatatggtagggtatgctttgacgtttggagtagcgcaagctcaagtctatggtttacagccctgttgcccgaggcatatcgcgttcctccaagaggcggtgatatgtggatcgttgaaagcagttcaatttccccaaaaagataacgccaatctgtcggacaggcaccatcgagataaggcgcggatcagagtggagcaggcgacgtggttcgttagtcatttcgccgacggggtcgttccggtcggcaagctagctcacagggtatcgctgcatccgctcgataagatccagaacagcatttcgcaccaggacggacggatggaacaaccccaatgcgatgggtgttagaccgccaccgtgatgtggcagttgcgagatgagctgttaccggatatcgccgcgtcagtcccatcgagactacggcgcaagactcgacgctgcgcctctaaacttacgtcagtgatctggggataggttaccatgccagcggcgaggcttcggtagatgagagccgcctcggcttccgacatggttttgccgtttctcaaccgtgacaattggtgctgtacgtctacggacgggatggcagatggcgagtctgaccatgtccgaaagtcctacgatcgtccgtctttagagaaactctgacgttggtggaagcgacggctttgtatctcggctcacctctcgccaataacgatagctccgtgtacgcctccaaccctcgatcctgttggcgtttattgaccattccttgagcttggtcgattcgtccggaaacatgaagccgctgccgagcgaagattctcggtacgactgcgaagcgtatccgatgctggtctggccgtagaattcttcttcgtacctacctgccatgcgaacaaacctgctcatatattcgtggaaacgagcacggatggctggctctccgtagtgagcgttgatcgaggcgacgacctgggggattgggccgcgttagcgatcaggaaggtgcagaacgatatgaatcgcgtcgactcgcctcttccacaaagatgttgtccggagtatcggggttgtacgatcgcatctccttgttggaaagtccactggcatgaccagacaagctctcggtgtcgttcgcgccggaagcctgatccgcgctgttcggcgtcctcgtgttcatctctctatccccgccatcgttggtcaaccctttcgagacggtgatcctgcccgtctccaggttacaaagcagatcccacgtatgaggcaggtcctcgaatcggggattcgtgacccccgcgatgtaccctggtacttcctcgaggatctcgagtccagccaggttcgaataggggaaagctcgttcggcgaaacctcgtaggactggtgctgtcaatgcgcacgccgcgagcacgaaattggccacgtgccccgcgggttgaccgtgtcccagaaagatgatccgtttttgcgtcaacagagcgttgagaaggaggatgatggggtgtgtgaaggcgccagcggtgtgaagctgagggtggaagggaggagcgaacgggattgggaccgctggtgtgaacgtttggatgagctggacgatcgagtactatcgaaagcggtagaaacagtcgggacccagatcagctcagcggacgagacggaactgcagatcccggacctggtactcacatcgccgacctcttcaggaaagatcgagagcgggactcgaatgggtatactcaacccgctatactccgccatcgtatcgaaataatgcgtatccctaggtccagcggccttcctgaccgttccgaccgtgtccacatcgggacgtccgatgcctaatccccgatactgctgctgttgttgttgttgctgcatcatgctcgcgttcgtcgacggactggctgcacgactgctgcccggcctgccggacgaatcggaaacgtacgtggtcccctccttgtcggcgagcaaggacgacctggaggtctttctcattctcctcccaccgccgtcggacaatctcgtcaaggtgctcttgaacgatttcctcatgctcaaccctgatccgttctggatggtcaccccgccccctgggccggacgaggaggacgaaatcgggttcaaggcggaccccgtcgacccgtctgctgtcatccaatcctgttcaaacaggtctagatcctccacccctccggccgaacccgaatcgtcttccacgttcccgggtacgttgatagcgttggtgctggacgatccgagaatcggctgaccgaggaatttctctgcaaacaagtctttccgctctgaattcctcaggatgatccgttctgccctggacaagttcggacaacctcgcaaggagatattgttgagcgagtcgaagagtttcgccaggacttgcggggagggggattggtagtactcttcgagggcgagcagtaacagcggctaatggcagggaaaaggcgagaggagggtcagctggcctggtagatggagacggctggatattacggtcggcattcatgttttagactcgccttgtagatctggatgtacggcttggtcgtacagatggccaaggccttgaccatggctcccctgttacgtatgtgcaccccatgtaaacttcagcactcttcccccttcccccagcggccgagcatcctcttttcgcaaaaaaccacccgaatggcgactcacctcctcacactcttgtcctccttcatcctcacgcaattaagtacgaacagcaactcgcccaattctccctctttgccttcgtgaccctccctcgagctcgacctcactcctgtattcccgggcgggtcgctcgtggtgttctttagggcgtgcgaggtcgaggagatgggcgacccggagacgaggacgggagcgacggcgttccgtggggtttggttcaggtaaaagatggtccagtcttccgaacgtaggtgtgccccgtcgggtaacatcaactctgctagggtgcttcatgtcacacgggcccggggatcgtcgcgtatggggatcatcagccaacgggacgtgctgggttacggtctttgaggagtattcgaacgctcactgttcatctgtaccggtggggaaagggtactggtgcgtcaaggtggctccttgatcgatatcaaactcggcgagcaggacaaacttgacgggttcttcttcgccctgggtcggttcttgatccatgcccgagctcatcgtcggtatccgtggcaactcgacctcgtttgtacctcttcgaccagtgttatcagcaggtgcgtccaggttgcgatcgttaaaggaaggttcgtggtcgatctcgaccgaggggagaccggtcgagggaaagacggtcgagtccgacgttcccgacatgtccgatgtcaatgtcgacgacgccgacgacgatgataacaatgtcgccatcgtttcgccttgcagacggggacgagtcggagtatgtgactgggttgatgggttctaccacctctggacctgagttcgaactagtctagggttgatttggggaggaatgtgaacgagttgaatgtgatcatatcatcggtctctgttcactttcctttctcctagttgtttgtcttttaaagtcaacacgagacggactagcaacatgtttgttcgacgacgacaaccatatatatccattcaatctcagctcgttccctgatcatcttcccaggagctcacagagaggcagcaggcaatgaaatcaatgtaatcggtgtgtgtatataacatggacatgttgaatcgtcgtcgtcgttgttccccaccttaatcccattttcccatttccctctcgctcactcgctcgtttcaaccggaacaacctcgtccggaacagattcaacttgaatagtgtcgaccctagataatcgcagccatcgccagcaccaccaccaccaccacctagtacacattccgccagaggtcaggcaatgccggctctacttcgacctaaatccgccatgcaagaacccgaatcaccctggacaaactcgttcaagagctcgttgggcaaacgccaacgcgagggcgaagacgatgctggtcgtctgacaaccgggatgaacggcatcatgtcgatggcgaccatgccaacgacaacgacgacgatgacgatgcaggacgttggatacgggaacggttcgagggatatgatggggatcgctgtgcatcaggtacatcaagagtcgaacgggtcgacaaacaggttcgggatgaagaggctcaagagcacgagcgtgagtgtgcaagactgcgggatcacctcgatcaaaagtttctgatcgtctaccatctacatatcatcatccgttacaggatcaaccgaattcgttttcaactccgagctattcctctttaccgttcactccgaccccaccgacctggctcgctacccagtctccctttgcatcgagctcgacgacaccactcacccaaaacccccactctcccaacccattcttcccatcctcctcggcatccacaccagggctaccatccgggaatcccacgttgcagaacccaatcgatacgtatgggtatgcagcgggatattcccgtccgagccagtccacggattacgtcttggcgacggggagcttgcgattagagagcccatacccacctcctacctttgaccatcaaccagactcttctgtaagtcagacccacctgcgctttttacatgacagaatcccaccgatcgatctcccgtttggtcaattactcacactcctctgtggttttacagatcccaatccatttcgatgacatggacatggacaacccttactcggccgccccgaacgctcctcctccttcgctctactctatgcaaagcgcgtcttcctctctgaatctccccgagtccggtccctcgacgcaacatcctcatcatcaaaccttccctcatcaatcacacgcaatgacccctcaacggaacccttcggatgctcttcgagttgggacgaggggacattccatctcccctcacgatgggtacgctgaaccgtactggagggacgggatcaagggtctcgccagtatcggtccccgggaagaggaaagtggcgatggttctccctcttcagacccgttccgaagagcaaaggcgaggggtgtgtcaccatcatcacggggacagcaacagcatctacaacagcatcagcggacaggtgggcatattacgggggagatggatttggggaggagcgtggccatggccatgggtatggggatggattcgagaatgtcacatggagacgccgagatggtaagtcgacgaggctcgggttggtagatcgtcgggaagtggcgggcatagcgatggtcggggtgggaccgtcgtgctttcccagttcggatcgagagtagagaatacccgaggaccgtgattaacagggcaattttcccgcttctctatcctacggaccgaactttccataggacgtttcccccgtattctccaccttgcgcctaccccaacccagcccggtcgatcccaactttgacccgaccggcatgaccgacgtttcgggaatacccacgacgccagtcgctcctacattcgataacgccccctccgcacccgtcaataccccagcgacgaccccgacgagacaaaacgccgtgcctcatctcatcatgaccggatgtcagaacaagtccagatactcgatgggcccgagggcggattgcgacaagtgcaggaaccggatcgaagggcacgtggcgcattggaaatgacatgaaaagaagagtcgccgacgaggctgcacaagaggggagagatgatcgtcgggccgggagggcggacgttccggcgatttgagcaacaacactattttttacgacctactcatcacacaacagtcctgacaacctctttcacggagacgggccttgtcctccccacaacatgctgtacatagggtttctttgattacgcatagcttttgtctagcacgccttgtatgccgcagatacagatgcccgtgaccttgcgatgttctgtcatcggacgatgtatgtctttccgtcaaaatcagaagagcgagagcgatttcccacgcagtgtaatgtattggttcattgacagccctatgcggtccgaacgatgacctcgtctcctgtccgtatccccaaatccgacagcttagtgtccgggtcgcccaactcttgaccctgaaactcgaggtgaaacgcgccgtgggcaaccgcttgtcctgccgctcttttcagtttgatgacgaggactttgagacttgctgacgggaggatggcgatgatctggggcaaggcggaaacgttgacaggagcaaggtctgggtatacgagcttcagatctgcgtgagacgattcttgagtctcgcttgacctgaggcgttcgggtggggaggctcgcgctcaccgatcattttgctcttcaagctgttcgacgcaggcttgccggccgttgggggaggtacagactctgcgatagctttatctccggatgtagaccttagcgatttggcgattttgagggcttcctcccgctccgcctttgttacctgagagcctcgggacattttagcacgggatggacgtcgcaatagactcgtatactcgatcgaaaacttacaggcgacgagttcagctctttcaagcctttgaaacgggcgacgagcgcggctctatccgctcttgtccccgataggcgctgtctgttacgcccgtcctccgatcggactccctcttcctcgattcgtgaagagattttaaggctctccagggctgtagggtcgtgttcgaaccatgtggccagatttccgaggttctcccaatcgtcaagcaaggtctccttgatgacgagctcttgcaaacgccggaacaccctgggagagtctgactttatcgcaggaacactgatgatcggattgaccgagatgtccaaccgctcaagcctgtcaacaacaatctttcagcgtcgttgatgatgtgcgtatacgatcgacgagcgcgagcggtcctactcacatgggcagactgccgaacatgtttacgacgtcttgccaagtggagatggcacaatcccctactaccaattcgcgtaatttcgtcaacccgggcgaagtaccatgttcccctcgtccgccggagcataacggattgacggcgatatctaatcgctcgagattagggaatgatgtcgccagcagcgtgacctttggggacgagcgtcatcgatcagggccgggtcacgttctagatgaggaccgatgggctcacatctcgccatgaaagtagactgttccggatggtcagatcggtgacgtttccgtagacctgttccatcgttgaatccagcggtctgtctaaagaaggcaatcgggaatgactgcaagagaaggttgagtgacccgactcgacccggagggagctcttcctcgaggcgcacggggctcacttgattttgagactggagagcacgggtaacacccggatgatctctgccaggtcttgccatcgagagatcaggttcccagatagatcgagacttcggacggctaggcagcgggtgggatgaagcattcaatcgaacatgtcgcagtgcaattcacgagggtacaatggatatcctcacatttcagcctgtctatcatctcgttatcccgttctcggtctcctagtccatatacccacatcccgtccagaccgagatgcgtcaacctgcctagatctgcaaacttgctggtgaccttgttcaagttgggcacggtgacctggatccgactgttggaagagccgagcaccaagctggggtcatccgtggtcccagcagacggctccatttcagagaggtccatgtcgaggtatcgatccttgacggcttggagcagtgtccttcctctccaaagcatctccctctcgcccgttggccgttccgcatcgatcgccttgatggcctcactaggtttccatctcagaaagctagcggccccttcagctcttgacttgaaataggacgttcctaaatgagtcccgctgtgtttccctcgagtcgggtcgtcccattctactccgagccagacccggtctcgttcgatgtccgcccgctcggtctgggtcgtgacgggtccgatgtagcgcagtgtacatggctgagaactcgcctgatggagatacctcgtcgagacttggtagtgtggatccatgttcatcagtctatgagatgaagagctcgatggggttgatagttggatgtatgatcgataggaggtcgcactactaatcatgtagcatgtagatgatggttgtcccttgtccccgacttggcttctcggtcgcgggcgctttgaacaaaatcgaccgagagcgaaagagattcacatcgactttgatcgtatcacctctctttcgacgacctgctcctacactgcccttcgtacttgcagcaacctttgagacgtgctgaaaagatagatcaccgtacttgatctaccccgcctacgaccggaacatcctgcatctaccgagctcccatcacgagaaatggacgccctcggccttcccatggcatttggctcgacatcttcgaaattcgcacctcctcctgctgaaaacaactcggtctcgaatccggagggcggtaatcgtcaccgccgtcgacaagacactgcaggcggaggcggcggtggtggtggtggtgtcggtggaaccgggccccgaggtcgaggtcgaggaggggctagggggatgacgaacgatgcgaggatgggcaaccggccatatcgaggtggacggggaggtcgaggtggtggtggaggaggcaggggtggcggtggagatcaagggtatcgaggtggaaggttcggagcgggtggtggtgctgggccaggtacaggtcaggtccacaaggtcagtcacggtgcccccccttactgtgcagatcgatccgacgagctgatattccaacctcgtcgacccccgctagaccccggatgggacggcatattacgacgagaaattcttcgaggacccatgggccaagatcaagaggacgtgacgagcttctgccgagacacacggagctctccatccgatttcgacctctgcacgaccaacctgtaacgccccgaccgaaacgccttttcaagttgtaccttccctacagatcgatcgatgaggcaattcaaacacaatattccacatcatggcaggcgcctcgcccatttcccgtctcaatctctgttcatcatgatatagagaatgttctgccctagggcagaagagttcgttacagagaaagaaaagggagacaccgctattcgtcgagagatccgtctcataagagacacgaggctggccaaatcctcggataatcgcgaaagctaaaggcatgtcaaaagaagaagaaagaagtaggttgggaataaagagcgtatgaaaagtggggaaaagttctgtcgttcgtcgtctccaggaagggtcgatggtcgtcaataccgagctgatgcgtcggcggtcaaggtagggttgggtcacggctcgtatagagcagatcgttcactcctcacatctgctcctcctcgaggggcatctgacacggcaaaagcgggcagaccatggcaaaagggagtcagcctcggcgtcgacgcgcaagcagatgtctggacgaccacgggcactcacgtcgtcctcgtacatgatgtcctcgtcgtcggcggtggcgtcctggtactgctggtactcggcgaccaagtcttgcaagttggactcggcctcggtgaactcgctagcgaggtcggaagggccgttcggcggatcagtagggagcgctctcgggcgaaatcgtcgacggtcgtcactcacagctcgtccataccctctccagtgtaccagtgcaagaaagcctttcgcctgaacatggccgagaactggtctccgacacgcttgaacaaggtttggatgctatacgaatgggtcggatcagagacgtctccagcgacaccaagacggggacggggactcacgaggtagagttggcgatgaaagtggccgacattttgagacctcggggagcaatgtcactatcgcgcgataaacgtcagcagtctcgtcccggctgaccagaccccgacgtcgatgacgactcaccagtgggccatctgaacgttgttagggatccactcgacaaactggtccgagtgcttggtctgcatggtgtagatgtaatcctcgacctccttcatcgagacctttcctcgccagtaagtggcgacggtcaggtaccttccggatcggggatcggacgcggccatcaagttcttggggtcgaacagttgctgaccgagctcggggacggtgagacccctgtactgctgggaagccctggcggccaagggagcgaaccctgccatgaaaaagtggagacgggggaaaggaaccatgttgacggcgagctttcgcaaatccgagttcaacgatccggggaactgtgtagttggggcgcggttgagctcggatctcgtctcgtgcgctcgacgtccactttgagactcactcgcaaacaggtggtcacaccggacatgacgagcgagaccaagtggttcaggtcagcataaggaggactggggatcttcaacgtgttcatgcaaatgtcgtagagcgcctcgttgtcgatacagtaggtctgatcagagttttcgaccaactggtggatggacagggtggcgttgtaaggctcgacgacggtgtccgagacctgatgacgtcggggtcgagcgcgggtggggggagggggtcagcgaacgagactacatgcggagtccgacgagggtccgtccgcctgactcaccttggccgaaggcatgaccgaaaaggtgcacatcatcctgtccgggaattcctccctgatcttggagatcaagagggtacccattccggacccggttccacctcccaacgagtgggtgatctggaacccttgaagacagtcggtcccctcggcttcctttcggacgacatcgaggacctggtcgacgagctcggctccttccgtgtaatgacccttggcccagttgttctatcgtgcgcgcgcaagtcgggcgggatggtcagcgtgcgatgcccctcaggtcgtccggtggacgagggcgaccgtgaaaaaagactggggggaaaaagtcaactcactcctgcaccggactgagcgtggaccctgatcgacgagacgatctcccatggatcagccagtacaccccgcgacgacgacgaacggcgagaagactcacatgttgtcgggcctgaacaagtttcccaaaggaccgctcttgatcgagtccatggtacctggctccaaatcgacgaggacggcacgggggacgtacctagggcgaacgaacgagcgggtcggggtgagagacgatcagttgctgcgcttacgtcgtctcgtgtcgtcccaaggccggggagaggggagggggggacgtcgaacggggcgaggtcgggggtgatccgtagtggtggtggggtggcgatgatgacggtgttcgcggtcgtctgcgtcggatgggtttggtgatcggtgccggcacccggcttcagtcacagctccagctccagcgcccgtcggacaagctttggatcacggtcagcaacatcgaatagaagtttacggaattgcgcgagtccatagtatattataccctacgaaacaattaaacaagactcgtgtgaacgggctcagtagcgggttgtttgccttttgtgttttaatttacgatgagaatggatattatttacgatacatattgggtcgtcgtcgtcgtcattggtgatctgtttcactggcgtcgaaacacgtcatcacgtcttcgcgttgggggcagggttgcgtgggttgcgtgatgaaacgaccttgtcagcccgggggggggaatagctggcacgagctggtagaagatcgttaactccgacgacgcgagacagcgggcagagggggaagagagttgccgtaatccctgtcgagttgcttgcctgcgcgtcgccttctcacgctgcagcacccatccagtcaggctgggactctcgcgcgcgtgaccccaagggcatgctctaggggaggagactacggggtcaacttcgagtccgaggtcaactttcattggttcccccctcctccctctcttcgtgctgctactccaccgccctcgcgccgccgcctctctcgcaaataaccaccctgacgacccttcccccttcatcacatcgacgtcgatatcagacgttgacggactcttcccccccgacccccaccaccatccggcaaagacaaccaccaaaagagagaaaatagtcctctgaaagattcaagatggtcaacctcaggatccagaagcggtacgttttcgcgtcacaccgatgcgcggggggggggcgatttagttgggaaggaggaagtcgatcgagagaggcgaggctaggtcgggcgagatgaggccaggccatggcagaagtagaaggcatcgaggtggacgatatcgtggtgggcatggtgatggcaaggatggacgatcggcaatggcaacggcagaggcaaatcgacggatcacggcaaatcaggcaatcatctcatccatactggctcctcacgaccgacgcgggatatgccgcatgaccggtactagttacaaagagagatcgcttcggaggataaccaaaagaacgaacgaccgctgggtatcattcagcgtggaccaggtctcgaggatgtatacctgcatacgaaaccatcctgggtttggcttacgtcttgcctactcgcgatcgacgtctcctttttcgactcgcaccacctctcccggcagcgtcacttggaacgtaacactcctggcaacccgactcgttcatcaccgaccagaccacgacgaccccgatcgacaagagacaaaggaccattcctctggcatgccgacccgctggtctgctcgacgacgtgcgacaagagcgacagcgacatgatcgacttgccctcactacgcctacgtcgcctttgccattactttgccatgccataccgctgtacaccacgcacctcgatcagctcgcctcgccctgcctctcagacgtcgttcttctcactcccttttcctgttcccccgattcatcccccgcgcacgaccccgtcgccgaccgaacgagccttttcactgacatccaccccttccatcctgccccgacagattggctgccgacattgccggtgtcggtaagagaaaggtctggctcgacccccaggaggctaccgagattagcaacgccaactcccgatccggagtccgcaagctcctcaaggatggacacatcatcgtcaagcccaccgtcatccactcgcgtgcccgagttagggacatgcaggccgccaagaggaagggaaggcacaccggtaccggaaagaggaagggtacggccgaggcgaggatgcctaccaaggtcatgtggttgcgccgcatgagggtcctcaggaggctcctccgaaagtacagggaggctggcaagattgacaagcacatgtgaggccgaggactcgttgacgagcgcgcatgaagcgattgactgacgatcgactcgactcgttccgcccgttcccgcccacgccgcaggtaccactcgctctacctcaaggccaagggtaacaccttcaagaacaagcgtgtcttgatggagcacatccacaaggccaaggctgaaaagacccgaaccaagaacttggccgagcagatggaggccaggcgtgtcaagaacaaggctttgagggagaggagggccgccaggttggccgagaagagggccggtctccacgccgtcgagctcgaggagtgagtctgtcgagcgtgttgcgtcctgtccatcctccgactgacccgagttttcggtaatatctcgtagggtcaaggagtaaacgtctcgcaaagacgtcttttactcattcatccccctctgctcactcgaccccgcggtgtccgttgggtcgagatctcatccccctacaaccctttcttacgtgtaatcatgactactgtgtcgcaccgtccaccatagtcattattctccaaacccccaaaaagttccgaatcgcatcgcctgagccggtgtgatttgagaggcgatgtgtggttacgatttgtgtgtagccgggtcttttgaccccgtttcggagggcttgtcgcgcgtctgtgaaggggagggtattcgtctcgcaccgcgtccgaaaatttgagtctgaaacgcagcgtcttccactaccctgaatgccttggctcgcactcgtcgagtgctgcaaccgacccgctgcaagactctaccgatcctcaagtcctgcgtagcgggaaaaaaaaagaggaacggggggtgcatgaaaatgttgcgcacgtgaagaccgagtttcattcaagggttctcgtcaaaggttccccgttgttcctaggccgtcagccgggatccgaccgatgccgacttgaaggtgtgatggtgctcctcgtgctgatctcgattgtcgaggagatagagagccagggcaggtcggccaggatgaaggcgccgataagtggatcgcgtgttatagcagcacactgtcgacaagctgatacagcagtcgcaaagtccccacttgttgttcgctgcggataagagctctatgtctatccatccatccgactgccacctccaaggcccgtcacggctcatctactagtagactaccaccccgcgccggaatttccatagtaatgcatacacagaccccgcactaaacactgtcttgctgatagatctggatcgcttcgtatgctgggtctggagagacactgattccgagtttggcctgtgttggagtgggatcatcagaaacgctgtatggtactcggctaggtttaactcttcccccctggaccgagggtcagcacccctcgttcaacattacctagggtccctgctcatctcccgctggtcgacctcgctccgggcgatccgaagctgattgcactcacgaaccgaaaggaataccgtcaatccaagtcagcgggtggctcatcgcggtggttcagtcgatacgcccgttcgtattctactgatatgctcgtgacggagtaaactgttttgagttccaggcgggccatttgcaagtgttcggatgatggtccacaagttttccttgtcactcctcccacctgctcctgatatccatcctgactacctgggacgttctcgtcagcttcccattccttgccccttgtcttttgtttaacgcgtagttcgggctggtagacgactgggagacacaaacaggtcgatgggtcagcgggtccgttggctggctcctgaatacaactcgtcgccgcttccgaatagtccttgtcaacaatatcagcttgaacgatcggtagtaggatgccaggcgaggctcgtgtgagactgttgaggcattggttctgtctgactgcgatgtaagggaaaggacggtccccctaatggtttcatgctgcgcaaatgcactggcgtgcccccggttgagcgatcggaagtcccactcgccggtcggactacagtttcgcttccagccgatttcctgcccagtcgaaaagctcgttcgagatgctcatcacgtggacatcaaggtttctcatctcttgctgcctgcgcgtttcgtttcgggacgtcgagctgcgccttctcgcttgcttggacgagcttcagctcgttctgggtctggtttaagcccagacgacccctatcgagctaagatcagcacgtccaaccgaactgcgtatgggcggggcgttggctcttgcatttgaaaggctcatatcgtgtatgctccgagtggaagcaaggtttgatcaccagattcgccaggtcgaagcaggagtatcttaacctatcgtgccgcttcttagatcggccctgatgcgccactgacaagtttttgttggagacactccaagtcgaagccttaaaagagccctggtgaagcctaccatactgactcggcaggattgggtcatttcgataacgtggaactgtgtgctctgtttgacgtttcgtactttcgagcagtgagtcgtttggcttcagtaagtttcggcttgagaattgcctggttcaagcgtggttgacgagacgcaccatttcagtactctgatcttccctgctcccccttgtggagatcacagggaagcgaccgccatcgaatagtcgatcggagacctacgcatgatcgtctcgctctcgattcgcctcggtttgacgcgcgctcgtcggccgtgttcgggccatcgattttgggcggatcgtctttacgttcatcttgccaggtaatcgcaggacgatatgatcacggactcaagtattcagccacaaacaacatgatgctcatgatacgtcacccaaccccaattccctgatgaccatttgcgccgccgtctatactgtctctcgccaccatcggtcgaccccctcctcctcgattaagcgcaaccaatcaaatcgaccgcggaatcaaatctgtttcgtccgaaatgccaagctgtcaacctcctcgaccgtagccgtggatgggatggtcctcaaatcgacattgaacctcgaatcatcgagcatcctattcaaccgcacgcccaaccctttcttctaaaaagatgggccaccgtttcactctcgtagggaaacaatcaaaccctcgactaattggcgacgacgactagcaacctagttcgttcgggaccaacctaccacgactgaaagatgtcgtccgcagctcctcccccaggagtcaccgtcatgtgagtcggcgagacgtaaccgagctctggtcgatcacccactcacacccacgtcgtgtctcctacgccgatgcagtctcggtgctcaatggggtgacgaaggcaagggaaagctctccgatattctcgccgccgaggccgacctctgttgtcgaagtgccggtgggaacaatgccggtcacaccatcgtcgtccgtgacgaggctacggggcaaaagaccagctatgcgttccataccctgcccagtggtctgatcaaccccaagtgtatcgcctttatcgggtcgggtttggtcatcaacatcccttcgatgtttgaagagctggacaatatcgagtcgcaaggtcagtctcgtcgtcgtcgtcatcgtcgccctgttcgcactcagaaacgctgacgctgacgctaacgccgactcgctctttttttatgacctgccaggcctcgactgtaccggccgattgttcatctcggaccgggctcacttggtcatgggtttccaccaaatcgtcgatggtctcaaagagatcgagctcggcgggtcgaggtgagtcaccctccggcgcgtcctgccccgtctgcatctccactcaccacactcgcccgcagtatcggaaccactaagaagggaatcggcccagcttactcgtcgaaagcttcgcgatccggtctccgggtgcaccacctgtacagccccgagtttcctgccaagttcaggaagctcgtcgaggggaggttcaagaggtacggcacgttcgagtacgacactgaggccgagattgagaagtacctcgtaagtctcttctcgtcccgcgtacgtccctggtttcctgtagcaacctgactgactctcgactcgccgcgcttagagactcgccgagcgtctccgaccgtacattgtcgacggaccggcattcttgcacaaggccatctcgcagaacaagcggatcctcgtcgagggtgccaacgcgctcatgctcgacctcgactacgggacgtacccttacgtcacctcgtcggccacctcgatcgggggtgtgtgtaccggtttgggaatcccaccgaccatcattaaaaaggtcatcggggtcatcaaggcctataccacccgggtcggtggaggtcctttccccaccgagcagctcaacgtgagtccaacgatcttgccgcagtgcagtgccgtgtcagctccgagacacaggctgatcgatctggctactacctataggacgtcggcgtccagctccaagaggtcggcgctgagtggggagtcactaccggtcgaaggcgtcgatgcggttggctcgacctcgtcgtcatgcgttactcgaccatgatcaacggatacacctcgctcaacctgaccaagctcgacgttctcgacgggttcaaggagatcaaggtcgccaccaagtacaagctcgatgggaaagaggtcgaaggcttccctggtgagtccccccatgcgtgctttgactcgtatcttcccgtcaaggtctcgtgctaaccctgacccccttctgctcgccttgttgcccgcctcccagccgaccttgacctgctcggcaacgtcgaagtcgaatacgtcaccttccccggttgggaatccgacatctcggaatgcaccactttcgagtcgctccccgaaaactgccaaaagtatgtcaaattcatcgaagactttttgggcgtcaaggtcgagtggatcggtgtcggtcccgctcgacactcaaccatcaagtgtttctgagcgggcgatgggtctggcgtatctgtccaaggtcatctggtgcttgtatgtcagtgcctcgatggccaggattgtaaatggtcggaaaaccaatgatcgtgcgcaacaccatctcgctcgttccctcgcgacggccgacctggcacctatccttgcgggtcgatatagcccggtcagccccgtttcatgtggaaacagctgttttcacacacgaatggggcagcgggcagtcggattcgtcttttctgaaatgcatctatcgtgactagtacatgattctcaacccactaggtgatcttccccgtttgtgacattgtcaatcgtgcggactgtcggctggtttcaacattacgtttcgtatcggtaaacccgcgatcatgagcgggggcacgtcgagatctcggcgaggggcttcgttcacaaatcttgatcgtcggttgctccgggcagctcggtcttccatttgctgttctcgactgacttcctggttatcgtcatgcggtctctgcggggcatgcgaccgtcgcgcttgttcgtcgacgtctagtcgtgctgcggtatcaatgccggcctcatcgagtagttgcgagatcgttgctatgactcgctcccactcggcttgatcttcgggagaccgtgccaatttgttgcccgaatcgacgacagcttgcgagattaacgcattcatctcgtcgtgaaactcctcggtatccgccggcaactcgacatagatcgcttcgcctcgattgagagcagcctccaccgccagacccgcttgtttcggcacgtaaaccatcgcaatctgttcagaagtagcgcctgcttcttgatctttgactgtttgcgccacagtgtcgtccgccggcctgatcagcagcggatcattgtcattcccccacaccacgacgcccgaagcaccggcttggcgagcgacatccagcttttcacgaaaagtacaatcaccgcgctgcggaaacgcgacaaatgcagcgtcttggccttggtaagactcgggggaacagcctaggcggtcggccccagggagcaccaggacgagaggttcgagcgagagacccaacaagtcgctctggacgcctgcgtcaggggtcgtctcgaccgagatcgggcgaccgaatatcgctgtcgctccaaggccttcccagacgacagtgcgcgctttgtcattgagcaggcccgatgtcattcgaactctaatttctgcgaggcgatcctgttgagcagcttccagctccgacccatattgctctcgcgcggcgtcgccttctcgacttgtcgatgctaggaccaaggggtcctggatgtatacgtattgtcccgcctgaacgcggtgattgccgactgtcaacgcggacatgaaaggtgcacacttcaatctaggcggctttgtcgtgcccaagtcgacactggaactcaccgcttgttacttcaaaggcgtcgccaacccgggtgagaaaggcgtggataccccttgcatcgttgatgaccaggtcgcccgactgtcgaaatattcgctcatcccatctggactgtgcagcctctttgtccgccgccgtgtgcgatatcaccgacgagctctcgttgtgagcaacaagtgcgatctcaaagtgctgaaaagcgagatgcgtcaagctttcgcgggtgaatacgatcctggccacattcaagacctacgtgaaagcctggctggggcaacaggcattgtccgaagagatcccagtagtccttctcgactaacggcatatcgaccagtgttcgcgcataatcataatctggccgcgatttgatgccgatacgaagacctccaagagtcgatccagcaggtacgggacatgtgacatccgacccagcgaattcggtgcggcgacgagccttttcgttatctgacacatgtccacgcgaagcccgaggaagcttcaggatgtgtccttctgtcgtgaacacggttccctttagatcggtgttgaccgggttcttctcgtcaaacaagaggtacaggtactatgatgggaatcaccgctgtcagcaagcagggccattactagcgccggagggtatctctgaccttgagggtttcgctatccattgtagcgtgcgacctcgcggttaacacttgacactactcggtgacgataacgatcaagctgctcacctcagcatgaaggattccatgcggtcttctttctgtgtaggtctagttgagcatcacgcgaacatatcgactgaacccggcctcatgctcactgctcctgtatggatattgtgcagtaccgcaaagccgcacctcactttggtgcgtttcgtcaggtccttgagtatccgtttgccaacttcgaggtagaacgaatctttcgtcgcgcggaacagccaatatgtgctttcaataaactcgggacgcaagggatagccggaccatgccacagtcttgttgacgtaattgaatccctctggcaatgacgagtgcttctgccagaggtgccagtacaaaaggtggctctttatggcggactcgacgtcgccagccaagacttgcaggccaggccagaacgcagacagagagtccagcatggtgcccaccggctggccagtgttcatctggacatttctaaactgaagcgaatggacaagcaggtcaacgtccggtcccggtctgcgcccgagtgcagcttacgagatgttggtccgaagacctgacgtgttgcatgaccgatcgatacgagtcgtcccagactcccatgtaggcatcgttgtcgaataatattgcgcctttcagcgcgtactcgtaaaaactgtcaataccggcgccaatcccactggctcccggcatcatccagcgaccatgcctgaccccgatagtattgccgagaagaccggtcgtgggcgtccttctggaccaagtgttcatgaaactttctctagcgacccgctcataggccttgttcccggtgagttggctcaggagagtgaactctaacgtcagcgatcccgtggccgccgcgcacgtctcttcggtttcgtcttggtcgattcctcttcgaaggttgattcgtgcaaacggcaaacccgtcggagagtcaaaggcaggtaacagacggtcccctagatcgatcgccagtgccagcaatcttcgagcccgagtcgacggtcgataatcatccagagccattcgtttcggcgtccagcggggttccgtgtcgatcggcgcggtcccgcctgtgcccatactcgcatcatctaccctggacggcgcttttcccgaaaaaagcgacccatcaatcacggaagataagaagtccgatgtgggtaggcggaatggcgtgccccaactggtctgcagtgatgaagctcgcttcgcgacatgtcgacgctcttctatttcgacgagctgctggtagctggataggagggatccgagtatcctgatcgtaactgtacgagcgagtgtcagcactttgagacccatttcccctttcgtgcgagtgccagtcctgaccctcaaagacctgtaccttgacgtctcggtcaaagtttaagatatcgctgaggactcggtctatcgccctttcgaattcggcttcgcctcgcatgagcggcatagtcgacaagatgtccagatacgtaagagagtagtctccattgacgtcgtttctaccataattccctctgttgatccgcatgtcagctttcctcgtcgagatcaggcggaggagccccggcttacggattggcatgatcacggccttgacctcgacaagagagaggtttgagctcgtcctatggaacgtaatttgagccaccatcacggtccgattcatagacatgacatggtctgacctcgggataagcaaacgccatgtaatttgtatatccatgattccaaagctggatcgaggaccgtcgtcagcgatacgtcacttccaggccttttgattcccaaaacaacaagcgactgaccgccctggtttcctcttgcagtctgcgctgttccttgctgctcactgcgatcacactctgagacgcctcgaccagaaggaaccataggatccataagggcagagtccagccccgctgaccgggtggccgcatggagatatcaagagatcgataggtgcaacgttgccgactctatgtgctcggcatttgcgcttcaccacagctaccgagtcaagcttccaaggggtctatcgagtcgtccgtcaaggagcatcgagacgaggggtacgaccaaatctacaggatcaagttgacgacgttgctcggacgcagggagccttcacgcgcaagcatcatatggtcggtcatatcttgtacggcaatcaccgagaaccgagcgacaaatccgaacgcaggtcaaaaacgtcgagagggatccgataccgttcgaaacggcagactaggcatacatgcttcccccagtagataccgtagaaccgcgcgaatcgctgacagtctcaccagacgacaaataggtcgactgattcgcaccctcgccgatatcgccgaatagatcgttgagctcatcgtcgccgaacagctcaccaacagctagaccaagcaacaccctttgtagtctctgttgccctagttgagacctcaaatccataaacccctctgatgatactacagtcatttcttgactgttatggtaatcatcagaattagagggtctgatgttattcaaactccagtaatagagtttgaagaagggtcccactagagcaaggaggatcagggggtggtgtatcccatttggcagttgctgctgctgcagccctactcctgatctgctggtcgacctcagacacgtcgcccagtacgatcgcgccgttgtcgtccagctcgcttggcttgaccttgccgaagagaatgatgttggaagtctcatcgagttcgggtgccaagtccgtgtcggccagcgcggccgtgatggcaaagtccaatcgtccccgagagtttccgatggccgtggtttcatagagcatgttcttcttgacgttaaattgccgacctgctgggaacgctatcgctagaccacgccgggtgatgaagatccgagtcatcacagcgataataccgtcgagaagccgatcatgcgaagtccagaaggaacggtcttgaaagcgacgttgcatgttggcccagacgttccatagacctgcgtcgacaagggcaggccctagccctgcgtcaagaggggcaggaggtgcccggggcggcggtgacgataacggtgacgatgagggcaaagatgatgatgacgaggagggcaccgatgatgatgacgagaagagcgacgacgacgagagcgacgacaacggcgacgatgcgaagaaagacggccccgccggacccgctcgagaagctcgagagcctgaggacatcttcgttttggtccgtttacggtgcttgttgtttcggcctagaataagcttggctacggattctttttcatccctcggcggcctgatcggtttttgggtttcgtgacggatggcaaacgtcggttgaatgttttgatcaggctcgtgaaagggctgtatgtaacctgttcccatcagtattcgtatctctggtcggccatagcgatggactcacgtctcgtttcgttttcgtaaatctcgtacaaatggcgtctggctgtcgtccgctcatcgacgagtttccgctggaagcagtcggtgaaacagtgatcgacagggtgagtggaagatcatacgggcgctgtgatatcaattgtaatgctcacctaagaccacttttggtctcgagaatgaatcaggaccgattgaatgagagcggtctatgctttgctagggatgccgtagatggaggcggttcgtgacaggtcgtgaaagtatctggcggccttttagtgaagcctagtcgtgatggaaggtgatccggaggcttgttctgtttgattcgcgatctggaaagccccgtcgacctggcccgtatcgggaagggtcccgaccggtgggtcctagagtgatgctggtgattgaccactcgatgattgtgctttcgttcgaatcgtttgagtaaacgtcgtttatcgctcgtgactcgacgtgcgatgtgcagtctcagactacgagactccgactggtcatgagctcaggtccagctatcatgaatggaggtacgaccaggtatggacttatgaggtcgttgctatatcgaagagaaagcaagtgttgttgtacgtcaatgtctgaatcagctcgaactggatctcccttggttccatggattcccaagaaaagcttccggtttccatgtgtgacgccatcgaagggcgagtttgattacgtacatttctcgtcatcgagttcccccggatgctatgacgatctcgatatccctcgtcaggcaaacgcaatccacctcgaccatgcatcatcgtctcctttgacagtcaatctcattcctaacctaggctacaccaactgctggctgttagcacttaccttgtgaggtgcttacaattagcaggttcgcattgacgacgaaacttgagatcatctgacattctgaccaccgccatgcgtatgggcatcaactgcaccactggcaactaatctggcatcccgtccgcagctagatatatactcgatcctggccccgtggatagctgtcaccccgagatcaactctcagacaaatagaaaggaacacccaaatcccatccgtataacgactcacgttaccgcccgtctgacggcctctgcccaacatgagtgggctcatgaacgttagaggggtcgtggtatctgtacgtatcggtgccatttccgccccacctcggttcgtcctagataatcgctgaaggggtctctccaaatctgcgcaccatctacagctcatcaataaattcatctctccatatgtcgacaatctcaacgccaatgacttgaacctggcgatcatggccggtaagccttggaatcagattgacacgctcgacgacatattcaccctccctccgcctatgatcccacgacaggcgatttgacgctgcacaacttgcacctcaaaaagtcggccgtcgaaaagtacaacttgccagtagaggtcgtcgaaggtgagaactcggctgggtcggtgtcaatgctagaccgcgctcagcttaccgtccaccgcgtcgtttcctttccatcgcaggccacatcggccatctccatataaccatcccctggttctcccttcggaccaaccccgtccacattcaaatctcggacgtcttcctgctcgtcaagatgcgggacacttctcaggagtctgtagaccctcaggaggacgaacgaaaggatcaagaggccaagcaggaaaagctgcggaacgccgagagtctggatgcggcggctgcggctggtcaaggagccgccgggcagggggatgaaggtaggtagccgggtcgtctcttccagcacaagcggggtcgtctcctgatttgagcgctggggccacgatgcgaacagccaaacagacctggatcggagctttcactcaaaaattggtggacaatgttcagatctcgatcgagaacattcacttgcgatacgaagacaatcttagtactcccgaggtatgttgtttcgtagactcttgctctgtaacgacaacgacaccaagctgacgcgctggttgcccgcttagcatcctttcgcggctggtgtgacgctttcgagtttcaaggccgtgtcggcagacgagaattggatcgaggctttcattcagaacagctcggaaggtgttcgcaaggtgaggatccgcatagtcgcatttctgggagctgccttggctgatcttttgcgcacacgatcaacagctggcttctttagacgggctggcgttctactttgataccgatgcgagcagtatctatcaacaaggagatcgcaggggcgaaatgatgaagagcttccaatcgcttgtcagtcggaagcgatcgcccgcctcttcaagctcggcgcgagactgacctgacgtccgatacagatcgcgagcaaagaggtagacgtaccgcatcaatacatcttgaaacccgtcagcggagaatcgagaatcaccatgaagaaaaagtactcgaaagaggtggccaagacggacgcgcaagtgttctttgacgagatcggattcgtgctcgatgacgatcagtaccgtgacgcgctgtcgatgctggatctctttcacttttacactcggacacatatggtgagatacggctaggtcggagtccttgggacgttgcgactgaccagtttacgctacagtaccaccgttatcgaccgccagacagcgagtttaccgaatcgccagccaaagctcgatggaagtttgctaccaaagcgatcctcagcgaggttcacgaacggaatcgaaagtggacctggcagtactttgaagagaggcgcgataatcgaaagcaatacgtcgagctttacgtcaagacgttgtcgggcggcaacacaacgctcggggtcgaggtgagtcttgtggtccgagactgccggtatacccaaactgaaccctttgttgcccctgtcaaggacgcgtctgtgctcgaaaagctggaacaggacctgtcatacgaggacattcgattcttccgctccgtcgcgagggcgcaagccaaaaaggatgccgacctcaagaagcggctgcagcacgaaaaggagaaacatcaaggtcagcaaaagtcgaccggctggctcggatgggtctggggaggatcttcgacggccggagatgaaacgaccggagacgaagacatgaccatttcggaggcggacaaggcccagttgaacgagattatcgaatacgacccttcggcagcttcaacgagtggaagcctccccgaagatttccttctgatgcgagtatccgctacgctgaagcgaggatccttggctctgcgatcggacccccatggggccaagcgagatctgatctcgctggttttcgattcgtttgcggccgatgtcacacaaatgccacagtcgttggacgctcgaatctcgctgggcgacttcagcgtgtttgacggcacaaccctcaacaccctccatcataagattgtcagggtgaaagaaggcgctgcgatcggaaacgcctcggttccaggcgaggaagtcgaggtcgaccccttctttacgctgcggtttgagcggaacccgctggatggcagagcggataccggagtggccattcgaatgcgtcacctcgagattgtctaccatcgcggttacgtcgaggcggtcatgcgattcttgactcctccagccagtcaactggaatccattacggcactgattgtgagtcgaagtcggggataaaactgttcagctgatgggatcttaaccgacacccctccgctgcgtgtgataggatgctgctggggaaacctttgacggtatccggagggagactcgagcaggcctcgaatttgcgctcgaacaccacaaggtcagtacgtcatcagctcgtaggcaacgggtggctgatgccatgaggtcgaccaacagacgattgatctgcaagtggacatgaacgcccccatcatcattgtgccggaacggtcagtggtggtcacttgcttgcagtgtatattccgaccatccgctgacgtcgctaccacaccggctcgacagcgtggacacgaaagagtgtctgcacatgattctggatgccggtcacatcggtgtcaatagctctctggcagacaaggccgaaatcaaggatatgcaggccaaaaaggggcaagccttgtctgacgacgaattccacaagctggaaggcctcatgtacgacgagttttctctcaagctcgagtccacacaggtccgtgaactggacagaagctcaatacctggagcgcaaggtactgatttggcttattacagctcctcatagggtacaagctcgatgcatgtctcgatgccttgcatcaacagcaagggtcttcagctctgcacatcatcgagagggtcgggatgacttttgtggttcagaacgccatgttgaatctccccaatctcacgcggttcaaggtgtccggagatctaccgagtttgcatgtcaacatctcggatgtcaaatacagtaagtagctgggcccaacatcgcagaaaggcagcgttgatgaggatcgataatgctcgccaaacagagtccttgatgcgaatcatcgacgttgccattccgcatacgaatgacgacatcgaggtcaagccggcccgacccgtactaccgaacagtaaaaagaccgcattccgcagtcagccggctatacaggaatatgtgctagatgatgacgagtcgatcctcgacgacaacgatgtgggcgaagcgatcgagaatgccgaaccggacaagttttacgacgcgccagacaacactactgacgtgagtctgctgatctgcagactaatttctccgatttctaacttgctcccctatcaggcacaacggcaagatcttcaccaaaagacattcgagttcagattcgcggtcggcgagttgcaggccgagctgtcgcgcagtacacctcaaggcgtcgaaaaggctctcgcggccgctcggttgaccgggttcgatctcgactttgctctacgcaaattcgacatgagcgtcgatttaggtctgcgaaagctcgaattggacatgctcgacgccgcccaacgccaatccctgatcgatacaggagattcgcaaaccgaagacctgatgaaagtcgcctaccgcaaagttcagaaggaatctcccgaatatatgagcgtcttcgacggcgccgaccagagcattgctgttgatctcacgacgttccggattcatgcgaaaccggaacctctccttgcgctctacgactttataatgactacatttgtgcctaacagtccaaaccagactgacaacgaggccgacaaggcacaggttgccgacaaggaagagcaactgagcgacaatggcgacaagatccggatccgcgtcaagcttaggagtatcgaacgtgagcgtcgactctggctacatcagtcagcttacactgatcgtaactttctgcggtgacagtctctttggttaacggcctggagcagtttgctacattgcgactctcgtccgccgatgtcgcccttcttttgagggcgggaacgatgcggctcaccacgacgttgggtaaattgacctttgtcgatgacacctcgatgaagacggccgacccctcattcaaggaactcttgaccatcgaaggagacgagctcgcggatttcagttacgagacattcaacccggaagacgaggccacgttcccaggctacaactctgccgtgaaattgcgaaccggttcgttggtgttcaccgtgatggacggtcctttgaagcaaatcatggtattcctgtccaacctgtcgcgcctgaaagctgtctacgaccgagcctcggaggctgccatgcagcgggccgcagaggtaaccaggatgcattacgacgtcttgatcaagacccccatcgtcgtgctacctcaggacggcctgaacagtcggaatcgtctcgtactcaggttgggtcaggtgaatgccaagaacagctttggcaagggtgaaaactctccggatagcatcatagcgtcactgagcggtgtcaacatcacgacggaagggccgtccggcgtgctacaaattctcgacagggttgacttgtctgtcaacgtggacgattatgcggcgagttcgaaccaactaaagacgcaaaaggtacgtgtccggatgacagtccgcctcattacgttcgtactgaccaggagcgatgcgctatagattcacggagaatccaacgacattcacatgtcgctcacacagcagcagtatgtcctcattatgaacctcaccaagacacttcctggcatattgcgaagtgacgatgagacgaacgctgcgccgaacaagccgtcgtcctctgcggtactggacgctactggaccggctcaaccacccgcagctatcgccgagaaatctagcctggattttgccttcaaggtaccggtggtcaggctagagcttttcggtaacaaggcgacctcgaaggccaccctcagcgaagacagtatcgcagcattctcgatcaacgcctcgcatgtgcagtacctgagcagggccgatggctcatccgaggccaacgtcagtgtcaaatcgatcgcaatgtcaaacactcggccagggaattcgatctaccgggacctgattcctgagggcaagagacgaggcaatcaattgtaagtcgtgtggtcgctcgtttctgtcaaactgacaatgctgatcttacccacatttatagcacggtgcaatacaccgtctctcctcaacccgaaggagctgcacaagctttagtcactatcgacagccctcaagtggtcctggcggtggaccctctatacgccctcaccgaattcgcagtagcccctttcaaggcggaatctccaaaggagattccatcaggcgaggtcttgagcgagaagcccaaggatgactcaccagtcaaggccgcgtcggaatcttcgctttcttatcgagtggaagtgcgtcattcgaccgtactaattctggcgagtgacaccgacccaaaggcgcaagccatcgagttgagcatcaaggatgtcgtggtcgctcagcaggtaaggcatctgtacagacggcaaagcatcggaattcgactgattccagcttttaacgtaggccaagatgactttggcggtccacgaactcggcatgtcgtttggtagaatggatcaacctagtgaacgggtcaggttcctcgatgatgtagacgtaaccgtggccatggacacgcgaggtatcgcgggcaaccagagcatgatcctggatgtcgacattacgccagtcatcttcagagcgtcctacaccgagatcatgttgatcgtcgatgtcgtcaacaaggctgcagccttggccagtgcagccaccagtaaacctgaagccgcgattgaggatgcgcaacagcgtcagattggccagcagaatgccgaacagcctagcaagatgatacaatccagacgcaagtccgtctcgactcgacctcaagttgtagtcactaaagagacggtcagtggccgcgagagtcttttctatcaaatcgctagctgatgcgcctcatttgctattgacagttgcacacccgtgtcggtggcttccaactcgtcttgattggagatctgcaggatctgcctctcgttcacctcagcaccaagcccttttcgctcaatgtcaacgattggtcaacggacgtgagccgatgtctcttacatggctgtcctgacgtgcaagatgcttaccgcttctgtcgatagctacatgccaagaccgccatgtccactacgatcaattattacaatctcatgaattcgcactgggagccattgatggacccatgggaatttgcgctgaccgtgagtcgtggtcacgtacgacgaatgagacccggtcctaattctcactggcttctagattgccaagacggctggtactggtgacaacgggactatggcggtcaagtttacgtcgagacagcgcctcgagatgaacatgacggctgctttcatcgagctagcaatcactagcgccacagtatggtcgcaacagcatgagcgcgtccagcatgaagggcgaggggtggacgctccttttgtggtccgcaaccgaactggatacactctgttggtctgggcagactctgataagtcgctgaggagctctggtcagaataagtccgtccaagtgcgcaggttagcggataacgaggccatcccatggcgcttccaagatcacaagcgacagagagaggtgagtcaggcgcgatcggccaatatccacgcatcacctgacgtctcgctctctgttagaacctttcttcgagcagccacaacgcgttcggtgtgcaatttgaaaacatgccttgggaacgggtccgcaatgtctcggtcgaccgcgaaggcgatcaatcatacatcttgaagccaagaatgaaggaagttctgcatcgggtcgtctgtgatgtcaagctcaaggacaacgtcaagatcgttacattccgttcagcgttccaggtggaaaacatgacgcatctacccatggagcttgtcctgatcgatgcgaacaacaagcaggccgctcctgtctgcaagattcgtaagcgcattgtcgcgggtggagacgacgagtacagagactgatgatccttcatgacactgaacagccccgggcgagagttaccctcttcccatcgaagccgcttacggcaatcgctttaagctgcgcccagaccgtaagtgcctaaaagaataccaatgaacacgtgaacgtgtgccgatcatctccaaacgtacaggcggattcgactactcgtggtcatccgagaccttgtcctggcaagatctggtcaggcgacccgttcgatccataggttgcaagcacaagtccccggaagaagccgtcttccgcttccaggcggcgagcttgtttgacaagaaggatccagccgtcaagtgagccatcaacgttcctgatctgaccgatattgctactgaagggcaatgtcatcacttacagacaatatcccaagctcaacctgcgtctacgcgcacctatcgaggtcgagaatctgttaccttacaacatccgctatcgggtctacgacaagaatacccgatccaacacgaccaacttcttgattcgaggcggatcgagtccgatccatactgttcaactggatcatttgctgctgttgagcgtggaagctcaagactctggtgagcaagcaaaatctcttcaatcgtcttctctgctaatttcgcgatacagggttcaagcagagcgaatttgcgatcatcaatacggataatccagatgacttccggaccgagaacagtctggtcctgcacgacaagcgcgaccagaagttgactctgaagctacattacatgtgagtacccccgatgacatagctttgacccgcacaataaccataccgccccccagcacctatcctgatgcaggcggagcaatgaaggttcagatttacagcccgtacatcatcttgaacaagaccgggctacctttctctttggcattcaagacgtggtctggtacccagaacaaggtcgcggggcaggaggctttcgccagtgagtcgaaccattcgtcgcgggtaaacatgactgacacttccttgtcctcctggtcgacagcgagtcacaagcagtcgcatcccaccccttatagcaagtcgcccacaatcagaatgatgtgcgcatcgttgctgatacttgcttggtgcctcgaatagtgttttcgttcccgacggaagagcgtagtaaccgacttttgctcaaagtgggcaattcctcttggtccaaggtcagtcggcagagcgaccgacgccgtgatgcttgcaactggttgacagtcgtcttctcttccgttagccaatctcggttgagaacgtaggcggtgattccgaagtcaccataccacaggagaggggtgatgcagtccatcacatcggtttctcatacgttgaaggccttggcaaggtgtgtaccaagcccagtctcataacgccatcgctgcgctcacgatatcgctgcattactacagtacaagctgagcaaggtcatcacgatcgcaccccgatttctcttgcggaacgaatcaaagcgcatcgtcaagatcaggcagttccgaactcagaattatctagacatcaagccgggcgatagagtcccgtggcacgcattcaataccagcgctccaacgcaattctcgttcgctctcgataatggggatgtcagatggtcagtcggctggacacgtcgaggtctgccggccgagggtggctgaataatgactcttgctgaacaggtcggcacccatcaatgtcgctgatgttgggcgcaatcacgttgttgtgcctaccggacaagagggtagcaaacagttgctgcgtatcgagatccggctcgagggtgctaccgttttcttattcattgccgaggaagaaggtacctggcctttgcgcatccgcaacgagaccgactttcctttctcgtttgagcagacggtgagttcgatcccgatgcatgttcaacggtccggtcgaggctgatcgaggcgcataggaggaaaacgcgccgaatggcccaccacaagaccgtagactcttgccgtccgaacctcgatcgacggtggattatgcgtgggatactcccgccgcgatcgggaaacgtattcgtcttgtcgcttccagccaggaacgtctcgttgacatcatggagatcggtattcaatcgccattcaaggttgccgccaacgtgagtgggcgtctggtccgcaagaatcactgctgcaccgagactaacgagacgacgaacagactcggcaagggtctcgtcggaacaggacgttctcgctggacgtccgagccgaaggtcactctcaggtattggtcattttgccatacgacgaggacaacagtgtgtacaggccgaagcgtcctggcggcaacctggtccgctctgacagcgtggacagcttcaacgccatgtctttcgagactgtcctggctcctgaaaagccaacgttgacggtgtcggtcgaactcgaaggtctgggtatatcggtagttaaccgcaacctgcaggaattgctctacgcttcgattcgcggcatcaaactgtcctactccgactacccgcacttttacgatgcgagcttggactgcaagtggatccagattgataaccagctctttggtggactgttccctatcatcttgtaccctaccatcgtgccgaaagacggcaaggagctggagtctcacccgactttgcagttgtcggtggcgattctgaaagacgacagtaagtccagcttgatggcaatcggcttttcatgtccatgtcaattaattgcctcgattgtagaacacggtgtcacctacgtcaaatacgccacgctcttgttacaagcaatgacaattgaactggatgaagactttttgtttgcgctctacgaattctccaggttcgacaacgcttcttggcaggagcctgttcacgagtgagtgcaacgtaggctagccaaagtcaagccgtggctgactttgcatttgacctgcagtgtcttgatcactcaaccggacactattcccgatgctaaggagacgcctcccggtaccaacgtatactttgaagatctcgccctgcagcccatgcaattggagctgtcgttcatgcgaacggaacgtgtcaatgtcgatgacaagtgagtcacgccgctcaaaaccaacatctgataccggaaacctcatatcggtgcccactctgtcgtctaggtcaagctcgcgcaacccggtcgtctttttcttcaacgccttgacgatggcattgggcaatgtcaacgcagcgccggtccggctgaatgcgctgatcattcacaacgctcggttgacgatgccctcgttgcaagagcgtgtcatcttgcactaccgagaacagtttgtagcacagatctatcgggtgttgggatcggccgatttcctcggcaatccggtcgggctgttcaacaacgttagctcgggtgttcaagacatcttctatgagccgatccagggtgtcgtcatgcatggacatcgggatctgggtatcggtatcgcacgggtgggtccgacatgatagaatcgaagcgggccggccatgcgagctaagttttgatcgctttccatcagggcgcttcgagctttgccaaaaagaccgtattcggtatcaccgatagtttgacaaaggttacgggtagcgtcggtaagggtttggcagccgccacgctggattcagattaccaagcaagaagacgcatgacgcaaaggaggaacaagccgaagcacgctctgtaagttacagcgccctactctaggctgtgatgcaattaacgatgacttgttctgcagatacggcttcacgagtggagccaactcgttcgcgaccagcgtggctagtggtttcgagggcctagctgtgagtcgctcgggatccagaggcggtgatgcgatactgatgatgcataccatgcgattaaactagctcaaaccgatcgagggcgccgaaagcgggggggttgggggcttcttcaaaggaatgggcaaggtcagtcgagtcgctgagctgctgttctaacgattcaaagctcatctccagctgttacgcatacgcgtgacagggattcgttggcgcggtcacgaaacccgtcgtaggagtctttgactttgcttccaatgttaccgagggcatccgcaataccacgaccgtctttgaccaggacgaattggatcgggtccgcttgccccgatttatcggttcggacggtattctcaaggtgagtcgcccttgccgcctgttttgcgaaagaacatgaaactgacaggcccgacctacccgtcagcctttcactgagagggaagctttcggacagttctggttgaaagatttgggtgagtagatccgagtcatcaagggctgttgccacccgactgaccccgcccgcacagagaacggacgatacttcaaggacacctacgttgcccatctcgaccttccaggggacgactcgatcatcatgctcacaggaagtcgaatcttgttggtgcgctccaataacctgagagtgtcgtgggaagtcccgttcgacgacctgcagaccatttcgctcgagcccaatgggatcagtctagtgttgatgggcgacgtggacggtccgttcatcccggtcgttggacagcgcgaaaagagtttcttgttcaagcacattgaaacgtgagtcgtagtgggagtttgccggagaagggaatcttcaagctgatgctgccctgcgctccatctcatagcgtggtaaaacagcacaacgaggtcagaaaatctgattgaacggtacgcagacaatagacaggatcacggcagtcaaaatgtatctatataggagtaacaagccatcgcatgcatgcattgtgtttgtccctcacgtgtccgtcatctcgatgccagctcggcgtcctctcttcgaacggcgttccgccaggccgccttgtctttgccctcccttgcctctatccgcacgcccatctcggtcagttcgtccatcaacagctgactcagacgtttcctgacggattcctcctttccctcggcaaccttgccgctcgctctttcctgtcgttcagggttgaccgaggcaaggtctaccttggttttggcgtccttgacggcgcccagactggcttctgtccgttcggtgcccctccacgaaccgcctacacccagcttgccaggaccaatgcccgctaagcgtcgccattcgtcaaccagcggtgaaaccttgtgcgtgatcggatcgccgatagtgatgctgattcgcttgcctggtcgcggcagaaaccgcagatacttgcgagtgtctggcatgacatcttcgaagcctatcgacgttgagcgatggtcagtgaagggtgtagagcagacggccagggcacgacgtaccggatatccagatgggtatgatggtaggcatcctggccgagtccatgatgattctcgaactgccaagcatatgacgccggtcaataccaaaggcacgcaacgatcgcagcagaatttccgctcacattccccatttgaacggtatcaagccgccaggaggatgcaacgagacttggttgacccgaccttcagggaaaatgtgtacctggaaacgcgcgccggggttaaccaatcatctcagccggctttggtcctagacctggacgaacccaatcgcctgcctgtagctttttgatggcctcgtcgatggcgggctgaaaaataccacctccgcggaccgtctcgatcacctgtcccagggtgaagaacttggaaaagattctgcgcagtccggcattgccatcaatctcggcgtgatgtctggtttcggataattctggggactcacgggttggtaaacatgatatcactagctgagccgatcgcaggacgtcattcagagcgagcgccaagtataccccgatcatggaagattggatgatgaaacgaccgcgaaatccgtctcccggatgagccccaaagtgacctatgaaggactcgaccccgcctctcacctccgagtgtccaccgcgtgttcctgcacgtcttgctcgggctggcgaacgggatgaaagtgttcaacggcatgatcccccacatctgtgtcgatggcaagcggtgaaagtgtcgaaaaggccggtaggtgaagcaaccagcgagttgcatgccaggccgtatcgtgtatcgttacacagacggtcggttcaatttggtttcgggatggacagacattgaaatccaaaattcgtcatcgagagagagagcggaggagacgaggtaaaaaaaggcgaaccgggaaccgtcagctctgtttgcttgtctgtctgtgagctacccggatgttcagagcaaacgaggcactttgaggaacgatggtactgaccatgggatcatccaccaccgaggtatgattacagatcgtgactacccctctcctccccagctcggcatcgatctcgtttccacccgttcccttttccctcgtctccatcgccgttgaacccgatgccggacctcgggccggttcctcgagcgcgttgacaaggttgtgcaacccctctaccttgacctccttacacccccatcggaggaaagctttggaggctagtccgaaagaggagaggatgagggacgaagtgagcgtagacatggacatggacgttgatgtcgatgagctgtcgtcctcgtccgctaggtgtagtgagcgcactaatatgcctcttgtgttttacagcgtagtgccggaggtcgattttgtacctcgtttttcgttttgtttggaactccgtatctgaactggcgagtcccgtgtcttcgcggtatacgagtatctgccgagtatatgcgggtgtctcgtccgcggtatcgttccgacttggcccgctccgattatgcttattccactttgcgacggccggaaagcaatccttcgtcaaaccccgtgatagttgcgtatcctcgtacggtataagaacctgattctctccgtccacctcgagcagagagtcggtatcacgaggatcgttgcgaatttcctcttcttcttcttttttcccgctgaatgaatggtaactctcgtgacctccaactctgggactcttttgacctagtgactccttcttcttcttcttctaacgtctttattcagatcctgttactgcgctgaatcggcaacggactcctatagatctatccgcggaagtccaggcggtacgcaagctcttgcaacgttgatcacgtttctatgtattatgcactcgaggtccgagacctacttctatatgtctatgacacggcggtatagcgagtatcattgacggaacagtcctacgtcttgacatgcatatcatcgtcgttgtctctgttcgtcgtcatgaaagaacaggttgggggggggggagactagtcggaagtaaatttccgaaatgatgccgtacatctaccggaagctaaatgtgtcggaagtaaatcaactcgtaggtggatcgacgccgatcaatcgcgggtcgacaagaacaagtaatcaaacggtcgtctaacccataccaaccggtgtctttcggaacgatgactttgaaggatttaagagatgttgagacgcaggattgtcgagatgtagatgggttattcgtgtctggcacgtcgttcagggattacttgtcgcacatgcaggatgctctacctgggctatgagatcggagaccgaacgggtatatagcatatatagtcgcctatgtagacgtgacggtgtacgatacaagtcgccgtcagactagaggcaacatcgtctcggcgctgtacatcctgatgctatgaaaatgtttcaccaacatggccgagtctcgatgagaccatgtctttcaggcgatcgcggcgcacgacattcgactacgagggcgacgatgcagctgactcgcgcgggatcctgcgtgacctcggtctacgtctcgacttggggaggagagaaagggacacattcgtacgtttacaatcgttgacagcctgactttgcacctttgcaccttgcacctccggaataaacggcccagagctcatgggagtgtgatcgaggctccgggggagtcaacctgttcgccctcgttgacctcgagactggctccttctatggcccctcttgaccgactctgtcgatcgttttttcttttttaatttaaagattcgggaattcaatttgtaccttgacagacgatgagtagtcgagatgaggatatttcccttttcgtcaacgatatcatctcgtcgttactaccacaggcaacagtatcaacattatcatgtcgttcttatcgtcgtcgtcgtcgtcgtcgtcgtcgtcgtttgtagttctgatcaaacgctatgtataccggtatacccgttgttgttgcccgttgtcatctggtcatcgactgaaccccgatcgaggtcattgacaaaagttaaaagctaggaacgggatcagatttccccgacgagcatgacacacacacatacatacaaacaggaacacaaccatccctgggtcagcacatacacacacgggtagtcgtcgtctaatcactactggtcactctccctgttcatcaactctcacatcctcatcctcaacctcgtcctcatccgtagacctacatctctgcacacgcaggtcactcctttttcgacgatccggtaccaacccccctacggacccgccatccccgtcacctgaacgaaggacgaacgacgtcgagacgcccgcgggacgaggaccgttgtcggcggcttttgaaccttcttgaagtgcgaaccccccatcgccccagcccatccccagccaggagcaggagcagcagtcagtggcccacacttcccatccatcgagcaacagagagagagacagggagacgcatcgagtcgagtaaagtcgggttcggttggtaaaaacgatcccgctcgggttactattctgaacggatctctacccctcaacaacgacctggcacgatcatccagtgtggatcacgggacgtcgtcgtagcacacagtattggacattacactacctctcgagatatcatcgtcgacttgcccctcggccgcgagtggaacacgcaacgacgacagagtaataggagacaggctcgaatcgctcaacctcttcccgtgacttataaagacgacgtactcctcccccgctcgtgaaccatgcctcgacggactttgcacctcttttaggagtcgaccgaattgaacatccgatccctatcggcgcgagaaggatgcctgggtgtgagagacgaggagcaagtgttgaaggtcctccgaccgagataacgacgacgacgacgacaaaggtggatctcgtcgaattccccggacacaacgatttgcctaccgcgtcgacatccagtaccgatcacgggggttaccctcctcctgcttctccttcagctcggggcaagtcgagcttggatagggtccacgaggggatcctccccaggtcgataaacgccaatccaacactcggtaccaactcgaacacgaacacgctgctgtctcagccgctcttcaggttcaacaaggccgttttccccagcagtatcaacaaggacgacaaggattctagtatcgatggaaagagatcgaggtacatctcgccttaccgaagtcggatcatccccaacctcgctttaggaggtcggaatcgtgaacgattgtcatccaccatctcgtcctcccggactgtcaaccacggcaaccctcaccaacaaccccattcgaccgcgatcgacctctctcatccggatcgtcagaccgcgggtctgagccagactttgacaccgcggaaagcgctcgaattgcgtggtgaaatcccactcgaacctatccccctcggtcggccgctcaagaaacattctcctgcacaatctcaaatcccgcaagctcagaccggacgggaccgatcgcatggtgccgtagggaagggcagggagaccgtcggagtggacacggacgtcgagccggcgaggacgggtgcggcgttgcctgtcatccagcaaccgtacatcccggacccaccgatgacgttcgccgatcgacgacgagccgaatcgggacctattgccggaacgtcgacgaccgaggggagtcgagctcgggtctcaccctcgaaacagcgaggcccatggaactggaaacggagcgtcgatggcgaggaccgcgcagggttggggtcgatctccaaaggcaaggcgcccgactctgcaatgcagggttctccgacagcgctcacgcccacgtcaagacggagggtcgagatcgaggagactgatgccgagcgcaagaagcgggagatggagagcgtgatcaattggaaggtacgtctcttgctgctggtctcaatctcgcttggtcctgatttgtcgactttgaccctgacccggccttcaggtctgggcagcggcgtgcgtcgcttccaatgctatccccatcgaacacgatttcctgcgatcgaccccccaaccaacacctcgttctcgatcccgagtgcgaccacggctagcggtgcataccaatagctccaggccaatgtttgattcgagcagtaccgtctcgagcgaggatcatatcatcagccccgtgaccgacgaaggaacaggctggacggcttcaggcgccgtgatcagggccacccggggtcccattgccgccctcgctggcggacagaaacggcccctgtctcactcgacgagcatgggtgaattgcaagcgatcaaggaatcgcaccggaatcaatccctgcccgacatgatcgccatcgatggcgagcgagatgcccttaacgggcctcgaaagccgaccaacagaaagactgccgggagatcgacgcccatgtcccgatcgaccgatgcgtcacggaccagctcctatgggccttcttccggtggaatttcgacacccacacctgtcgccggacccaccaacgctttacttggcctccgaccgagattgacaaacaagaatgtccgtgaaattgcgctcgaactcgtacacgccctctcggcatatacggagctaatggacggcctagatacgtccgagcgagcaaagcgggatggaaaaaacaaggcgccaagccggacgagctggagcaggtctgccctcgatgatgcgagagaaaagggtctgctgaatccggcgacgacgcaggaagcacagtttcagggcggcgaagtcatagccttgttcagagatttggacgagactatcggatatcctggatacgttgaaaaaatgctcgtcaaggccgggtacgggatccatgataccgtattccggcgcgagaacgacggcgacccaagcgcaaacaatgacgcgaagcgactagactcggaacagtgtgaaaagatgctactcgacctcgaagaccttttatggggccgatccgagcccctgcctgatgacattgcttatggccatctggtcctgccgacaggcaagatcgacaggcgaatgtcggatcagggtcctgaaccgatgtcctccagcctctttgacatcttggccgaacccgttcctgataccctgacggacatgaacactcacgatttcgccaagccgtttggagcgactatgcgcaaacccagcctgtttgccgatggtccgacgtcgaggcatggctcagtcgtgtatatcccgggcgtctccactatcgacattgccgcctttgttatgccatcgagcggaaggaattcggtcgacccccacgaagcaggggcaggacggccggcaagacgcgaatctacagtcagagtcaagtcgcctgaagacctggcgagggagggaagggaacgatatgaagcgtggcagaagagtcgcgagatgcagccgttaaagcggtcttgaaattgccttggggagtcatcgcaatccgacgctgatcgatgcaaagccatatgcatacatagccgtactacagtcttcgtgaaacgtagcgttttattcaggccattcggattcgttaatctgcgtcatgccgacgagtctgcgcagcgggcacagactagactagtgcaatcatgcaactgactcacaacgagtggcgaacctcccctacctcattgctcgatcccggtttgagaagtggttacgtccacccacacaggatattgggtatgattggttgggagtatggttatatactgcgcgagaagctgtaatcatcaagatacaacgcagtgcgtcatcaaaatccagctacgatgaacggcgccgcaacgcacttctcggttgatggatcgatatcgcatcgaactcgcagtggcccaacctctggtcgtagtgtcgcttgccctatgatatcctcgttggcgttgtgtcctctatgatcgtcgtcggcatagttttcctcgtcattgtcgtcttcctcctcatcaatttgtgttcctcctcatcgagatcgtgtggctcctcacccctgtcgtggtcatcttctacttatctgtaacctcgaagcctttgaagcaataccttgacattgccctttggtgagccttttcttgtctgtctctatgtaatcgcctcgtcgccgcgaccctccttcccaacgactctggctttcgtccccgccccatggctctccgttgactttcgaattttcgtaaatgattatctatctcttgtggcctttgtctcaatgggaactatttcagagatatgatgcttctttacagccgtgacggtacgatcacaaatcgaataggttgcaagctgtaaggtgatccagaagggcaaagtcataagcgctgatgaccgaccctcgaaggtcgataagtctctggtcgactttgaccttcttgacatcgatctcagaatgcattgcctcatatatggtcatagagctacagaggattcgatcaagcgggtcatagtgtcgttattctcgcctgcctcggttcgtaaggaacgtcactatgattccatcccctagcttatatcgtttactgacatcagacgcttcgttcgtaaatgtagatatacgccaacttcttcatcgtctcgttggcttcaccttccgccttgaccaccttttcgtcgttgaagaggacccagctgtcgtcatcttgcttgatcgtggcgacatagtgacccgaatgtaccgatggtcctttgtgggagatgaatgccttcaggcgatactcggcaggcagcgtcgtggatcctccaatgctttgctcggtcggcgcgctggccatctcgacatcatcctcttgcccgtcatcatcaggatgactgaacaaccaatcgacggccctctcggcattgttatcctgaatatattatgggacagtcagccgccacgattagagaaatatgttgtctcttgattttcgactgactgtcaagcgcaacgcctttctcgactgcgcagcggtgaaccccatcatgctgatctgttcaatctgctcgtttgaaggctcgggcccagcgttcgtcgttgccttggctccagttgtcggaagaggctcgtcaatatcttccaacggggacgcgtgcaggatcagatcagctaagggaccgattacatctgcgatcggcagctttactcaccaggatcttccatgtgcatgatcaaccagtccatagccgcatcggccgtactgttgccggtcgccaacagtcccttaacgcaacggatacgagggaaacccatctccatgagttgcgcgaccaagccctcattgacttccggttcatcggcggctgttctcgggagaaaggttgagggtcagtctcagaccgcaagcgccggcaagagctcctggaaccagcacacaccgtgactctcctcttccactagttcagtctcgccttctttcattccaggagccaagtacccgtccaagctaagtcgatcctggacgttgacagggatgtctggagcaagccgggtcttgtaagcgtcatacccggacctgttctacaaggcggaagcgtacccaatttcgttggcacccagttgaccaactggaacttgcgcatgtgaatgaccaagacgtcggggaatgacttgaagcctgatgatctgaagcgacaagcagggtgtgagcgaccaaagttggcgctgcaaatcgctcagctgcgagatacccacttgagcgcctgcacattctttttgcagtggggacaatagtactctaacggttccgcttcggtcatcagattgagacaagacgcgaagtcgacaggtttgtactgcttcgtcggcgcggcggagcccccatcgccttcaccaacaacgatcggcgcctcgatctccttgacggggaccggaaggctgatagagtccgctcggtccgtcttgagtcggacgcctctgcattcgctacagacaagcttttgctccaagccgaacttgaaggtctcggtggcctctctcgcttcgggcaggctcttttgcttggcttcctgtcgcagtcgttgtatcaagtgctgcagaaactcttcggagtcttgttgacgcatcgtcgaaaactcttcatgacctctgccgacaagagccttgaacatgttgggtttgatcccttcctggaaccgcttcccggactcctgatcttcgccgctcgtggcaggatgagaataacgtccagatagaagcccatcgctgattttgaacatttggcaatcaaggcagtccgccgggagcagctccgggcagttctcgaagtgcgaattggaggccgcgtagcgctgcctgaaagcgggtagcgagaaaacaccctgcaagaccgatgccatgtagcagctacccagtccgatgagaagcgtcaacgacaggtctttgttgcaggataagcgtctgcgtacctgttcccaaggtttttgagcccagtcaggccaggtccaaacaagggctccagctcctttccgtcatctcccgtcatcgaaaagtcgaactttagattgtgctcgatttgctagtcggcgggatccgtggtctcgtatgagcttcatcgtgggagaatagaaacgtgcgaagattttctacggagacttaccaactctgtcatgctcttgtccgtcttttgttgatcaaccacgtccataccaaaatgcttcagatgacgaggcaactctgggtccactttggaatcgtcgcaggtgtagcaatagatgtctgtacatccatccgagccaacatgtttcacgaataagcacattcgtcttgggatattgttcgtggtcggcaactcacctccaccaccttccggcgtgatcgtccctaatttcacgcccacgccgtgtcccgtggcctggctatgttccaaggcgtggccgtttcccccaatcccgccgaactgctgcctcccacagttaaccgaggcacaggtcaaacacaaccacaaattggaggtcaggtcacaacaactacagttgggcgagactgtcagatgtccctggaaaattagccggtgatgaggacattcggatattggtcaccatggcgtaccttggaagccttgaggaacttcatcctgtacgagcaacagggcatgttcgcaagccgtcaactcttcctcccacgctttgacttccgattgttgagcagaagccatcgacctcatgatcccctcctttatcggttcaagctagagcgggcgacgatccgtgaccttagtccgctgacaggacgagtccagttcgatctcggactcacgctggcagcttccgtgatggccggggtatccgctgggcacttgaaacatttgtatgaagtggcatattcataagtctcattgtcggaaggcacgaccagtgcgagcttcttcatcggcggttcctggtcgtcctaccaaggaatatggaatatggaggatcagcgttggtctttcgttgctttgcaaaactattcaactcaccctcaccttgaccggcttcttggtccgcttgacgataagagccaatgcatgatcggtcctctggtaatggagcttggcatgtgctcgatcgtcgttcaagcaaccgccgttgaagcaatgaaggcacacacagacgccttgttcgtcatcctacagtaggaacatatgaataagacggtatccaacaaatactcatacattgagactacttacttgtccgtcaaagcactgggtacattcttctctgttcgatcgagaagattacgtcgtgagtattcgtccttggccttgatgacgagtcgcttctcggctcacttgtggacctgctggtcagatctgggaggccggaggttgactaaatattcgtcgatatgagcgcagaccatattgtgctctgccagagtgacttgattagcccagattgaagacggtcggcgtagtttgaggtagtcgatgtagtttttgatgaggatagaaggacatgacgtgacctcgagcgctttgtagctgctgctcggtcgacgcggatcgccgaactcccaaagttgtccaccgactctgctacttgctacacttgctacatgttggtatagctaaatcaggccgaggcaccctcgtctatacccatctctcgcctcatctcatcaggttcgatctcaacatcagctctcggcttgtctcagagattcggtttcttgtacacactgcgagacgccagcaagaactcccacagtctgcatgaaccatccatcaacatgaccgtcttccccgagctcatgagtctgatacctctcgattacacctacgtcgtctgtaagtgttcaagaatccaaggcggcttcaaaactaccctacactgacagtctggaatgtcgtgaccctgcagacgacccgtcagatatcatctccgcacctctcgcgctgttgacgctgtcccctttcttcctcttctcggcctatgcgaccttgatcatcataaatcggccgctctcggtggtcaacatcctgctgggacaactagcaaatgaagggtttaacaagatcttgaagagaaccttgaaggcgggacgaccgtggttattgggcgatgggtacgggatgcccagcagtcattctcaggtgagaccttgcatgacctccggccggcgacaacgaacaggatttctgacatactccatcccaatatccgatcgtcgacgatgcttcctccacgtccagttcgtggcatattcctccagcttcatgctcgtacatctcgcttgcatataccatcacctcccctttggcttcccccaccggcatcgccgtacgccgacgtcccgcatcaccaggtacacgctctctaccggcctcgtcctctggccacttttgaccggttactcgcgataccgactgcactaccattcggcccctcaggtcctggccggtctggccgtcggaagcatcgttggaagcttacatgccatcatcaccgaggtggtccctctatggtaccctaccagcatgctcggtcgactgcgcggcaagctggctaagcggtgggaacaatggccgatagaaggatggggcggatggggagccggtggacgagagacggggaaatggttggactaccctgaccgtacgaaaggtgtaccaggtagcaaaaaggaccaatagatgggatgcatggctgccgtaaacaaaccccgcctcgtcccttgctgtttcacatcgtcgagccacctgagacgcgaccgtgatctccgcacgtcatcctttcacgccgccgtgtttcgcttagacgagcgatacgaagtcgctacttagtatatattacaagctctctgcgatctcgatcgactactggctaattgtagggtgtcgcccgcgctccgccctgacttcagtgcacgtcgactactcatcctactcctcacactcgtggcatcccgttccaagtaccataacaacatgcgcgtcaccaccaataaattatcattatactgtctctcgctcttcttctcctttgtatcgattttgcgcccggtcgtagcggtcaaaatggcccgggatgtcgactggatctataaagcggaaacgactcccgttgtgggaacctccttgaccagacgggctactgaggaggctgcaaaatcggatcctacaactggacagggagtggtgacatttttgcaagtcctgcagcaggcgaacatcaagtacgtcctgagacctactaagagcgtttggtcacagtcggcatgctgatatttatctccaacagatcacaagcctgctggatcaaccttgtcaacgccacgcaatccgagatgggcagttgtcttcagttggaaacactggcacaacttctcgttcaggatccggtcaacagctccttcgccgactcggcctcgacgtatctttctgctatgtgtggtcaagggcaatgttcgcagcaagccatcgatgcctggaaaccggcattcgattgggattgcggtctagcggaagattcagggacaccattagtccaagcccttgacatgaccctgaagctgtatacctcggcctaccgaaacttggcttgtgatatcaccttgtgagtcagaaggagatcctgtgtgtccaggccactcaagtgaacctttccttcgtcagcaacgggacctcaacaaactgtctgaccgaagtcctaaactcgacagctgtgacaaataatcgagactttttcaccaacatgatctcgggaatgaacattcagtggtacgaccagtcgttcttcggcgtcaaatggtgtacaggctgctactacgagatgtacaaggccgccatgttcttgatcccgtcgatacaaggcttggagcagatgcactggctcggcggaaatttgactcagtgtgccgagccagcaaacgtgaaatgggccggtgagtacataatcgagagtcttgttccgcactatatgctggcgctcaacggcccctatgatagacgtgtgtgaccgggcgaaaccaaattctctaatcgttacgccaaacacaaaccaaggcggcgcgagcacgggaggcgcgatgtcactagcattgccctttggtgagctaaatagggtaactccagcagtctctcttcttttatgggcagccagtttcctggccaccatctagaagcggccttctgcgcaaactattcttgtatcttattgggtggttcatagagtaatgtcccctgccagacggtcgcgcttgtcgtcagcgaatctgactggtctgcatatcgacctcaagtgagagaaccagaatttactgtgcggccacaaagcaaacggacctgtcattgacctatgtttgggtagttccggatcgcatcaggattgccgatcagaaatcgttaggctccagcacagaaagaggaccttgagatcgcccagacatacccgtaccagtagttgatagccgtcatgccagatctcgcaaatgttcgtaaatggaattcctgaaatccactttacagaaacgaatagagcttcttcggcgacgatgttgaacgaaactcacagtgaggcagcagcccttaaaagctactgtcgtcatgagatcctgcctcgccacgacatgaccgctgtgtcagagtcccgacatgcagaatagcggagatcttacatgcgtgtgcatctacaacctgtagtgcgacactcttttcgactgcttttgagacctctttgcatgggggtatgcgaagaagtatcaagcatggagccgagctcttgcaggtccttcaggggttgcatgttgagaatgctatggctaggtcgcatcggtcgtaggagtgcgagtacacgcttactgacaatcggtagtgatggcagtcgaggccgaagtggttacgacgtagcaattgaggccggtgtagtcaccgccgcagcggtcgagcccggctggtgtttggggcccttcagaaccatttgacatgtcctccgatgcacatactaggataaagttccgaatatctatgccttgtgctgattcgtttcgtctcgttcatctccgacggactcggacgggtagaccgtccttgatgggtcccgtcaatccgtcgccaatctccaaaagtctcccggtgaaactctcgtcctcggtatcgtgagacatcgattcccaccaagggctccacgatgcgccgaggttcgcatgagtgccatcccatgcgggtgaaaagtcgaaacgtagcatcaactctcgcaatgcaaaaatgagttctatccgcgcgagctgcttgccaaggcaacttctcggtccggcatgaaagactggaaattcgaacgccgtctttctcgatgcgtgatctttcggcagaggttggcctttggcgtcccggttccagtaggacggagccagccaccgttctggtttgaactgttcagcgtcttctccccatatccggatcgatcgagacataacccagggactccatacgaccttctctcctgggtataccgctgtaccgtccggaagggcgattgcttcgagtttgacgttctcgtgaatctctagaggaactggcggatgcaatcgcaaagcttccgagatgaccgcattcgtgtaagggcaatacgccgtgggtgacgtgctcgaactgaggtcggccagtgatgtcgattccgcggcctcgcctggttgttgtgcctgcacgaactcttcatacactttggccttgatcagaggattgagtaggagcaggtagatcgtccacgagagagcctgagctgtcgtgtctcgacctggaggaacgactgccctttcagctcctatcgtcagactcgataacatggcaccaactcacctgcagtcaggaaattgagacaactgtctgccaagaatcgcacctgatcgtcttgaccccgttctttcaccaattcttccagcaagacccccttgcctgacacaagtttctcatcctcgtccccgctgtccagaccttcctcttgccgtctcaagcggtcccttccctccctcacgagctcgtcaccgaatgacttgacgtcctcgatatcctttctaagtcgcgcgccggaaggcaagaggaactcggtgatccggtaaaacgggttgaagaacctctcgtgcgtcttgatcgcagctcggtcgaacggtcctgcaaaggacgatgagatcttgccaaagttggactgcgtaggaaaattggcatgaccttcagactcgataccgctaggtaaccagcgctgatactcacatcgtatgccaattctccaaacaccgccatagcataacgataagcgacctcttgtagatccacgatctcccccgctcttcctgtagtcggcaccgccttttccagatcgccgaacagcttgtcaaggtgtttcggtaagatgctatcgaggaaatatttgagattggtcggattggcgaacgctgcgtgaccggcggatcgttgtactttccaggcgttaccgtttgttaggatgatgctgtgtgcaggatacgtaatgggttgactgaagcgtttacatctcgcgacgataatcacacttacccatcacctgcattcgtccgagagcgatgaacccccaagtttagcgatactgcgatgactgcacggctgacctttgcccggactcaccgaacagatctgccagacgtgaagtcgcgagctctcccttggcaaaggcatcatgcctggtgctcagaacgtgtttcacacatctactcaagtttggcacatcggtgcctcttcagtcacgttctgggtttgggagtgctgacgattcactcacgcagggtcctccaacacccaagcctgccctatcaacggtagtttcaacttccaactctgaccccggtggtagtctgtcgcccttttgagccattccagtgaagcttgcctcggtacggctgcgaaccaggtgaagtgtcccaagatcggtagcggcttgtatttggcactgatgtcgtacagagtgcgtaaagaacgagattagattgggacggagcgggagctcgcaggcgtttaggtagacttgcgctcgtttctcataccaccggctgagaagcaggccaacaaccccagccaggagtgtcaacgttagcgcccacaggacgttcggaggagtaagcatactcgacgaccacagcccagagctatgttactcccgatgccggtgtacggctgtcgagtgttctgcaaaatagtaattcgatcgaggtccatcaaggtaccccctatccatgaaggagtggtgttgtgcttatgtaagccgaattgtgtcagaccgccacgtcatcaggaacatacagtgtctggaccgagacgtcgacgtagagacgcacttgcgcacctgtacatcattatatattcagtccgagtatgtgtacagacgacgatttcatttcattcaacatttgtcactttggaaaccatacaagatgacactaggagcgcaaaattcccgcgaaagatgtggggaaggggggctttagcagcgcgtgtctcggacatctacttgtccttctgctggtcgtaaggagtagagtccacaaacgcgttgacagcctgtgcggtgaactttttcctcatctcttgaagtttaccgaggaacccgtcttctccggccgagttcttcattccagtccactcctcctcgtgtcttttcattccgaccgacggttcagcgtagagctctagaggcttgttccgaccttgcggaaactcaccggaggatcaagttggtcgccgggtctcggtagaaagtgatcttgctatcagtagtcttctcgatccccgtaaccttcatgtgatactcttgcgattgagatacctggaacgaaggaggtttctattgaagttgacgaatcgaaccggttgagcaattttagcgaaaccgcatggtcgctcgtaagcagaacgtgcgacttacgacatcagggttgtccaagaacttcaaagcccgggtgtaggaagccgaaaagatcttgggcatggcgctgtgaagagccgaacacgtaagcacacgaaccgatctgaggctgaccaactgttagacaatgaacctacttgaactgcgccttgacctcttcgagaccctgagcgattccgatagggtcggaaaagatagccttctggtcgtagtgctggtaggcttgggagacggggttcaactggtctatccttgacaaagaccagagtaaatggcggagtgatcagtgcgtgtcttacagactcccgggactcggtctcacaaaggttgagaatgtcatccatgaccttcttctcctcatccgtaggctgcctctccgggaaaccaaattgaggcccacggttctcggtctcggatttggcggggttggaaacggcagggttagacgacatggttcgtacggcgttgacagtggttcggagtcgaagtgtggtgttgatggcgtttctgggcaaggtgcgggtcaaagtgaatgacatgaggttcgtttgggaatttgagaaggggtaagatggacacgggcgaggcaatgtaggtggctctctttgactcttgctcccctttgtattccagcgagatcgaatgacacggggatcggggatcggggggacaccaagtggaggtcagacgggctagaagtgacgtaagacaactcggcaatggatgatgtcatcgagagatcatgaacgtgtttcatcagctattagctgttagagttgcgcgtagacagacaagtgattgtgttgcatgcagacggcttcgaagctcaaggtaacagccacaccctgctttgcatcaccgatcgaacccgccccaatatcctctactgatccttcgcctgcgccgcctccaaggcaggaggcaatcgacgcggaggaaagaccctctcccaagccgccctgtacgaaacgacaatcaccgaatcgttagcaggtctcgcgcatcttcaatcgatcgggcaagaggagtagcaactcacatgagttccaccaaaagcccttcgctccaaggtcgacccaggatacaaaggctgaccggttcctggagcgtctcgtcgtatcccagaggtacagtagcgatagggtacctggaggacatcgtcaatagatgtcaacggcagtgtgaaccagagcgaccacacgggaaggcaacaaacttcgctggagatcctagccaaaccggcacgccgagacggtctgctagcgtgaagaagacggcatcgagctcatacttgttgaagaatccttcgagcccatcgcccgcgatcttttcgactgagggaagcagggtgggaatacggatacgcctctggtcagcaaatcgatgaggaatccgcggtcgtttgtgggctgacttgctttctttcaaggcttctatgtactccggatcatctttccctttgttagcttcggctttcaataacctcgtctggtttgggtatctgggaggcatttccacgtcctggacccgcccatacgttgtcaaccattgcaaacaggagagagccagggtgatagctagaagggactttgcaatttaccttgtgatcaatgttgaatctgtcacatcgaccggcccgagtcgttcagtgccaatatcacctcaaaccgttttgctgtgatcgaccgagcactcactggatgacgtcggcgagggtatggaccgaggtcttggcgagggacgcaaagtactcggccaaatctgctttacaatccgttcccatgactagatcatcttgacgcgcaaactcttcctgatcaaagacgatcccttcagtgtcatcgattacggtcgctccctgttcacgaagcttgacgacggcttccgagatgatttttctggccaaaacaaggggaataagtgagcgaacaaaatccgtacctggcgctccgaatgcgctcacctcttgaaggccgtctcggctctatccggccagtcgagtgattcgaatcagctcgcatccctcttgcgtgcatctacttacgcactctgtcgcataggattcgggctcccacggataaaacccaagtttcttgcccttgaacgttgggtcctcggtcaacttgacataatcgatctcccccttggcatagggagaccttttcgctgtgaccgtagcgagtccttcagtttccagcctcgtgtcagaccggctctgactcgtcgtgatttactgtttgggtccctctcgtcgggcccagcgaggacctggagcaagagcgccgagtcgtacacgttcttggtcatgggaccgatgacatcccgagcgaacgtgatcggaatggcccctgcagagctgatcaagccggtgctacgagaagaacaacggttcgatcagtcgttcaaatcttgtgagctatcgattgcctcacgtcggcttgatcgagtatagcccctatgacagtagcgcgataggatcaattcatgagcctggtaacccgcttaggcgatcactcacggccaaatcagccggacagcaaatggaaccgcaagtctcgctacccagtgaggcgggggcgaaccctgctgagacagctacagcgctaccagcactgctccctaatagtcggtcaggatgatggagttcgggcattagtgtatgcgttccttgaagccactgggttgcactcaccaaggggagtcctgtctggattatacgccgaagtacaaggtcctcctcgagcgctccatccatgttgcaaggcagccttccattcgtccgtgccctcttcatgagggttttcctgtacgtatcgggagatcagtcacgtcgacatgcctctcattcttctcgcagtcgctgtacttgcaattcgatagtttgcccattcggacaagttcgctttacctgagaaggagccgaactatcgttagacgaccgatcgatcagtcgcatcgcatccatttcgacttgccaagaatgatggctccgctctgtctcaagagcttgaccacggtcgcatcctgatgagagcagaatgtgaacctcgtcagtcgcctcgacctgctttccgatagcttattatcaattcgatcatgaacgactgattcacctctttgacgactgaatcttccagagcatagctgccggaggtggtcttcatccctaattccgggtcggtagcgatattgtccttgaccaggatgggaattccatgcagaggtcccagcgtcttctgctgggctcatgggggcatgaatatgtttgcatcgcgagtatgaatgtcattgaccaggagaacgcttacaccggctcgtctttgctcgtccatgtcgcgagcgatctcgagcatgtgttctcgagggcccgtctcgatgaccgcgtacagcttgaggcctttacgattatccttctcgatggcggcctgccagtattagaaaccggacaagttcagttcgattggggctttttgatgatcaagacggcagctcacgaggtaagtttcgaccaggtggacgctggtgcatgttcccttggagagaaggttctgaagatccttgatggtggccgtgaggacattgaaggtaggtttggtcattgtgactggcgagtgaggtcgttttctcgagatttatcctgtgtgtctgtgtgtgtgtgtgtgtgtgtgtgtgtgtgtatgtggatctgatagtcgttccacttgaagaggtaaggccgtgttgtcgaggtgatcgagtggtgagtgatggccgaagagtattccaggtgcttttatatattgatttaacttcgaggatggattgaagacaaaggggatctcacgccgcttgaagacaaaggaggggatctcgcgccgcttgaagaggtctaattggcgtctgttgttgttgttgttacagtaaagtacttactctactcacttcttccctgatccctatatccctttgtgtgcattgtgtgttcacgatcgtttcaaaggataggtgtcctcttgcccacgtgatcgatgactcggagatgaccgaagcgttgaacatcccccggccccggcagggatcgatcggtcgggaatcaacacggacatggaacgaggcgaatctgaaaacggacatgaagtcatttgaatgtccgctcatcgacctgacctacctgtccgtgccgcgtcacgaactcgaaccttgacatcgttcaagattccgttcaaagggacaatgacctgtaatcatgctcgtcgaacccagctcgactagaccaaaagctccgcttcagcctcttgccatagaaagcatgcgtatcgtacggacgttcctctctcttctggccctggtctccaccttggtcgaggggaaatcagctactggccaacgcgtcctcgtcatcgtagaacatgccatcaaccgggcagactactcgcagttctgggatagcttgcaaggtgggtcagccaggcttcgtacgaatcaccaaggtcagactgatctgatcggagtttgtcgctgtagcacgcgggttcgagctcacgttcaagggacccaaggaggagacgcatcggttgatcgagtatggtgaacgcaactttgaccacctcatcatgatggccccttccaccacatgcaagtccccgtcattcgacatttgaatcgcccgctttgattgcattgttgactcgtacctctcgcccttgtagcctttgcggaccacctcaaacccggtcgactgcttcccgacctactggattcggggataaacaccctcttcctctcttcgtcagaacagtcagacgccctctcttccctttatcgagaattcgacctggaattctccaagaaacacactggactcctcactcataatccttcctcttcgtttgggctccggacatccagctccaacgttcaatcccactcggtcgtcgctttccccttgaacgaagggttgcaccgggagattcccgagagtatcatccccgctcgtctcagggaatcggtcaaacccgtcatcttctccggtctgacgcataccccgggccacctgaacccgttcgtcatccccgtgttgcatgctcctcgaggggcgttctccggtgacctgcccaggggggacggcggggagggtgagagcgagtacgacgatgatgacgaggaggctatgggtcgagggtccaagggcaagaacaagttgacccaggtgatcagtggggaagacgccgggttggtcagcgttttccagagtcggagtaatgtcaggttcggttgggtcggtgggatcgggatggtcaaggacgacgtgtggactgccgagtaagctcacggacgtgtctcactctctacgctcacctgatggatggctgacatgttgatgaccttgttgacgacctactgcacgatcgatcgtatcacccctactttgatggggtaaaaggaccatgaacccggaattcatctcgagcttgacctcgtgggtgtttcaagagaccggagtcgtcaaggtcctctcgaccgagcattaccgtcagcgagaatcggccgagggaaacgggaccgtcaaggagactagggacaggttcgcagggtacaccgtcaaggaggatgtggtgagttccgggtcctggtcgtttgggcgatatttgcatctgggtacggaaggctgacatgatagtacgactcggctttatagacgtacgagatcaccctggcgcaacatgacccctctttgaacgacacctcgggctatgctcccatccagatcgatgaccttcagctcgactttaccatgctcgaccctcacgtccggacgtccatcgggtatgccggtgatatcgctaccgagcaagggtatcgtgcgagcttgtaccgcaagacgttcaaagttcctgataggcacggagttttcaagtttgtcgtcgattggtggagacccgggtgagtcgagaccgtccacccctggtcctgagtgtccaaacacacgctaacttttgagctcccgacggatgacgccaccatgggtagatactcgttcattcatgaatcgagcgcgacctcggtcattcccttccggcacgacgagtaccctcggttcatccagggtgcttacccgttctacgccggtgctttcttggtctcgggtagtttcctcgtgttttgttacttgtggatgcatctcgggatcgagggtgacaaggtcggacgggggaatgtcaaggaaaaggaaggcaagaagagcaagtagacggtggtggttccatcgtgtggcatgtgtgtgtgtgtgtgtgtgtgtgtgtgtgtgtgtgtgtgtgtgtttcgtgccatcacattgaggatcgaatgatagatgcattcgtatgtaggtagcctttgacctgcccctgaaacacgatgacgtaatgagaattcggttcggctatcctctcgaattgtggttgttgcgacccaacctttactccgatctgctccggattctggttcaaacatccagaacatctagaaatttcacgactgcttgacgttcaatgtctaggtttcccgccctgcagagctgttctcaaggactataattgcaaggataccacgctccctctgattctcgacgctcgcgctcagacacctactcttctcttgaaatgctcgaaaacatctacgtctgtcggcatggattccggtccaactggatcgataagtccatcatgtgcgtgtacctcttaccacaaatcagctccaatctcagagtcggatactgaactccccgcatacttcgctcatgtagtacgggacctaccaagctcgaacgtgatcctcctgtatgttcgcctgacccgtggtgacgtccaagggggctcgaaaagctgacacgtcgggatcttcctgcacacagctggcagtgtacggactggtaagctcttcgacaggtagtatccctcgatgcatggcgctcacgcttaccacctccctcttcgtcgcacatcgcaggaacaagccgaagctctcgctcggttcttctcctcgcctacctcttacccctattccccctcgtccgatccgagcacctatattgaaccgtcctcaaagcccatatccgacctccctaagcctgaactggtgttttcgagcccgttctatcggtgcatccagacggcaggtccgacggctagagaattgggcgtcgaggtcaggctggagcacggggtacaagaatggttcgtcccggtcaaaccgttatatcctcccttgtctacgatttgacctggatttgtcctcttgcgtttgttcttttcgtaggtactcaaacgtgatcgactcgacgggccttcatcctcgacccgcctcgccaaaatcgttgcagacccatttcccaaagaccccgctctgccagacgtacggctcgacggtgtacgctagtaaacgtggcgagagtctcagcgaattgttggcccgggccgagctcgtgagtggttcccctgcttgccatggggggattaaataacggcttccggatgatccccggctgatccgcatctcatgtgggatggggcgttcaagtttgcagatgtctttatcaaccggatagaggctgaatatcccgaggtcaggacgatcgtcatctttgcacacgctgctaggtaagccgagtccgtcgatcggtaggatgatgatgactgactgttgtatttcatgcgtagcgtcatcgccttgggccgagcggttcgttcaccaagcaggaaaagtgtagcccgatggatgccctcactgaacccgaccgacctttgcaccacgttcagctgactgggaacaaatcgctccacgtcacggccggctgtgctaccacctcgttgtaccgccgtaaacccgcttcgtccagtacgaaccctaccgagctccctgtcgactcgttcaaccccgtgcccaagcgtctcatcccggatggtgtcgctcacgaggatcaacgtggaccggtcgccgagggcatgtacgaatgcgtgtggaacggaagggcggattatctcgtcaacggcgtcgagagggattggagcgtgagtgtttcggatcaggttgtcgttgcggggtcggttccaagtcgcaaggctgatgccggctcgtcgcctctttggacctcagttcaaggacgtcgtgctcaactcggatggacatgtcatcatggtcagtctcgacagaatgcatgagaatgttacgattcgctaatatgcgaacgaatccacgttcacaggaccgtggcgatggacgacctcacgagccttcggacgaattgcctttgggtctccccgaagagttcaccaagtacctatcgcgggcggatccctatacttcgatcgtcatgcaggcctcgccgattgaagttcaaaagctcgctggatacgaacacgagcagggcaaggttgaggacaaggacgatgtcgagcgagccgtgattagtgaagtcgagaagaagggcagggtggcgatgctcgaatcgagaatgtaaagacgagcaagcgacggggaacgagatcatccatgtagcatctagcagatccagccgtaaatctttttgtttgaagcttcgcaccgagaacatgatcgaaaattcaaacttctcagccgagatcacccaatccggtcaatccctgtcgaacaaaacggtcgaaaggacgatcatcgtcgtcgtcttcgtcaacgcaccattgctttcttgtcgatttcgttgcttctcgataatcgacgtcaaaacaacaagagattgctgttttttttttcaaaaatgatgagccaattgccatggatcgttggtcaatggcatagatatatatacagaggtctacaccatcgagggcgtcgttctcgaatcgaatcgtcgtcctcccattgacacttacatacttccttccattcaacatcaaccgattgagacgagcacctttcgagatgtcttgtaagtccgatctcaactgtcgttcccatctcttgtacgactctacgactcatacgcgacaacgttgcttctcagccgctgcttccgacatgactgattcgccgaccggttctccttcgccttcgactccgcccacctcgccatcgaagagcaccccgcccacttcgcccaagaaggctgccgccgcggccaagaaggacgaagcgagtaggaagagagaggtagagaagatcaagaagtggaggaacgttcagagaggcaaggttctcaaggtgtgtcgccgtcctagcttctcgcgcgcgagtcgtaactgaaacgcttccttcccttcactcctatattgtccttctccatatcgcagtccattgagaaacacgagcctaaagccaagatcctgctcgagaagcttagcaccgtatgggactcttacggacttgccgtgcatcaactcaagctgctcgacgaagagcgagtcgatgatgccgaaggattaaaggagaagacccaggcttacgaggacggagaggagatgttgcgagactttgtcggatgggtggagaaggtttatacgccggacgaggatgccgatgccgaggttgaaaaggtatacctgtttgcgagaacgccgtgctcgacgtcgaaactgattcgacgactcgggactcgttgatttagatgcatgtggacgagaagcccgatgacgacaataacgatgatggcgaggaaaacggaggcgaggaagacggagacgaggacgaagatgaccaatagcgtacagtctcaattatcggtagtagtaataggtcctctcctgtactccacttggaatgtatgcatgtatacgttggtgattgatcgttaatgctgatgcatctatcgaccaacttttgactttgaactttgtgaacaaactcggtcaacgaagaggatcagttcaaatatcagactgctagtctgctgaaccaactttccctgttcatcttgaatcattcatagatcatagtcgacaatcatattcatttctacagcagcaatgataagctaggcccagtgtgatatcatccaagcagtagtcatagcaaggaataaatcgtatgcacgtacaaatcaaacgataattcttgcactggggatgagccagcaggacgagtctgtcaacctgaccaccatgaacaccaccgatctcgcgacgacaacgacgtcatcggtgccctctgctgaacctcctacctcgctgatcgaggaagatgctcatttccggaccacccacgagtatcccgagatcaggacggatgatggatctcgaccgcaggacgatcaggagttgagggacgaggtcaatgaacagatgaacctcttttggggagccgtctcgagcgctttcgcccaacccgctacgcatgatgaacatcatgaacagctcggcatgggtcaggaaggggtctctggagaggtcgtccatgccgaagaggcgaatcaccaggaagaacaggtcgtcgagaacgggacgcagctgggagacgaacgggtgggcaccgacgggtcggatcatcacatctatccgtcggattccgtccacggcgaggctgcacacgatgtgaacgatgaggatcatcgtatgcacgactccatcgagacgcatgcagcagtggaagactcgacggatcaccctcggaacgagtgggagcatgtccaattgctcatgagtttgggtggacagcttggtcaagacctggccgtgttggaagacgggcaagggggcgccgagatgcaaggaggatatctcgatggagacgacgggccttcaggaggagcttcgcacgatcccgaattcggtccttcgatcaatacgacgaatacctcgcacccctcaggcctcgacagcgagatcctctctcgtccccatactcgccgtacccgggtcgcagaacagcctaatgccgaagccggtccgtccaggttacccgactccgcccatacagactcaggaacgccacccgaacccaagacccgtaaacgggccgctcgacaatctaaacccaagaccaacccggacgggacccctaaacctgtccgtccgaaagttccccgtaaaccccgtcagggaagcgggacgacgccttcttcccctgcggcacctcgtcctctcttgtcggcggccgagaaacgggcgaatcacgtctcttcggagaaacgacgccggaacgccatccggatcggatacgccgagctaggtgcgctggaacacatgagcgtcaacaggctgtggcctttgaccggggatctcgaggcagtgatcgaggagagcaaggatatggaagggatggaagagttgaccggtcggaaacggtctagggaaggagattcacagacgggtgaggttggggacgatccggcgcacgatcccgcggtcacaaacgaggacgggtcgggcgcggcgacgggtgcgggtgcgggtgcgggcccgaaatccgctcccaagcgtcctagaaaggggatctacattgtcgaccagggcatgacgagcaagagcgccatcctgaacaagggggcctcgttggctcaatggttgaccgaggggaacgcttggctacgtgccgaagtcgagcggctcgagggtctactcggggtcgtcgcgggtcaggcgttggatccgcaagacgaggtggatatcgaagaggagcaagtatgcgagcctgaagaggtagaagaaacgggagctgagcggcaggttcgacatgtggatgaggactatgatctggatggggagatgggtttgggcgtgatggatgagatgggaatacattcggccgaggtgggagatttggagaggcagttgatgatgaacggcgggcaagacgtgcatctggaccacgtcgagcacgacattgccgatgagggcgatcagcatcaaaaccaagactatatgcatcatcaccaagccgatgacggtcacgtggtcgaagagggtccacatcacgacgagcacgacgttcatacgcattatgacgggcatgatcacgacgccgatcgagaccatgagaatgatgagcaacaacatcacgatcatcacgacgtgcaccatcacctcatcgatccaccgacgacgatcgagcaacatttcatccaggccgtcgaggcgcttcgaccggcgcaggaagagatcgggccggacggctatcctcgggacatgtactaggtcgtctttgacgcgccaacggtgggaacgagcagtcaggggtcgatcacatggggtagtttgggagacgatcttttcggctctctgcggaatttgtagtcaagttcgagattcgttgctcttagaaaactcacatataccctcgatccttttctgaattgcaccgggccaggcagggaaacaagatcggacccctggacagacgaccgagttgcacggctcctctcagttcgatgtcgctctgtgattgctcgagggtgtacaactcgtaatgattacagaaagaggatggcgactggatttgcgcggggtacacacgtatatggggtcgtaatatcagaatcgaggcggtcgtcaaagaaaggaaaaatctcgtgggagaccgaatcgtcaggtccagtgatgttcgactcaagcttcgataaagtctgctgccatcagtctattgaatacgggatcagcaccgagctctcgatggtcagcttgggactttccccctgaaggtcacaacaactttatgtgtgggggaaaacgcgacgactcacaattcgagtgccaactcgggttcgatcctctcgctgaaatcctcggtaatctccttttgcgccgtgtccttgtaagcgtgcttgaagtgtaggtactcgacgatcttgccaacgatgatgcccctgtaatcgagcttgatggtttgagtggcagattccgcaaagttggctgagggtatgcaggggtgacgatacatcgaggtgtcagcgagtgtgtggaggtgatcgtgattgtaggctgagcattgctcacccgattcgtccagagacgacttgatgaccccgctaccgaaagcgatcgttttactataaatcgaggtcaacaccgatcagtcctccgcctcttgagaaaagtcggtcgaatgaacacggtcgacaggactcacgggatgacgaaagagtagccgtcgatcgagttgatcctgacccaaccttgttcgaggtcgttggcgagggacgtcatggatgttggcgcgaacgtgtttgtcggtgtgatacgattgcctagccccaacacctctcgattgtcgttacctccaacaagctgtcgtagagaatagagtggcagagaaggctatccatctgtacttacaccgtagtctagtcgatcgacatcactcgacttggaacttgtattttatgcgtttctcgatttcgcgtaaaagtacagtttgagccgcgcgagttgaagctttaaaagattattgagatcgatcgatggaacaagtcgatctggtcgacaatgaatgtagtagtccatacatccgaacggcaacacggactcacgtacagttctatagaaccacccacgcccgatcatcacgtcaatcactacttcatcatgtccttgagaaccatcgcctcaccagcccttcgacaggcgacctcgatcgctcgatcgacgcctacgatcctggcccgcaactatgcgtccaaaccccctctctcctcggaacccttgcctcaaacccgacccgtctacccacctccatcgaacccgttccagcctcctccccaggcatcacccagcaactcgagcacgcaacagacgggtcaacagcattccccgttcaaggtcagcatcgtcaaggcgttggccaagttgatggggtacaactcgaggagcgtcacggccattcgggagacgggcaacatgtgcggatcgatcgtcagggctgtggaaagggatcacgatttctggtaccaaggtgagtcgcagctcctgcagagacgtccacatgcccactgcacgaaatcgggcgatggtgttgcaagcaagaaagaaactcgagagctgaacccgcctatttgctccgatcctcgtcccgcagaatgcggccttccggcgacgtaccagacgtttttccagctccatctcgtctacctctacctcctcctacctcgtctccgatcgttgcccaactcgaccaccctcggacggagcagcacctcgctctcccagacctaccagaccgagctcctcacccactttttcgccctcgccgagaaccagatgcgcgtcactctcggccagggggaacgagaacgggtcgtccggaactatatgaaggagatgggtgaacagtggaaaggagccgggatcgggttcgattacgccatttcgatcgggcaggacttgccagagatacccaagggggagaggtctacctcgggaggggacgtcgagctcgccgcttgggtatggagaaacttgttcgccgcgaggtattcggacctttcttccgatttcactccaagcaccgccgccgattcctcgacgacgacgacgacgacgtccgaggtcccggcagagtcgtcgacctcgtccgtctcgtccgctaccgacccgtcccacccgatccaccaccttaaacttcccacgcaactcgctcacatcgtcgggttcatccgtcgggagctgtatcgactggatcgactcagtgatgaggatatcgagcagggcaggacgggagagtttggacgggtcaaggagatcaccggacggcgtggaggcgaggagacggtcgatggtgcctagtcggcgatgtggtcatgtttcgtatgagcagatagacgatggagcgaatcgcaggtggggggttggaaggagcactccgtgctgtcctggtctcaatttcgacacgtcggaattcaaaattgtcattaattgtttcgcatctatatatcatcatgtacatcggatcgggattgctttcagatccgaagatttatgtagccggccccgctatcctggttgcacctgccggctcgaccatgtcgtcctccaaaaccttctcagaaggcgtccttaccggccggggtctcgtgacccagacgagcaccaacccgatgcaaatccccatggtggccagcccgatccctacgtaaaacgcgctgcggtaccctttcagcacctgcgtcccgtccttgttgatctgcgtctcgacgagcccagcgatccccaacccgatcgagatgctatagttgagtacggtattgacgagcgaggcggcgagcccctgttggtgtctaggcatcgaggccgaagccacgaggttgccagcgggaaaggaacagtccatcccgatgggcatgatgagcatggcgataaagctcgccgcccaataattcaacgagggtggggtgacgccggcgatgatgttgcccgtggcaaaggcgaacatgctcccgagcaagaggaaccccggcctgatccggctaatcaggtaggccgtcatcagtgccgcaaaggctcctgaaaagatgacaggcaccatctgcgccgtagctttcaagggcgagtctccacggagaatctcccagaactgccaaatgtagactagagtcgccgagttgagggaaaattagacgagagcagagttgtcgcgagaagacgactcggtgcttacaggtccagattccaaaagaactccatcccgccccgatcgctgccatgacgagcagcagttccctggtcaagctcttgataggcacgagcggatgagatgctcgtccttcgacccagactatcgatgtcgggatgcaggcaacccgcgggcgtgagctctcgtcgatcgagcgtaatcatccacggcacagtagcgccctcgagactcaccgaaggcgcccataaagagaaacccgacgatcaagagcacgtatacgtagaccgtcggccaccctacgacgggcccttggttgaacgcaaagttgatcaagatcaaccccgtcgtccccgcgagacaccctgggagatccaagctccccttcatctcccgctccgggttatactcgtccatatccgggatgaccgtccagctcagcccggcgaatacgacgcaagcgatacagttggcccagtagacccaaggccaccatccgaattgcgcgatcaacgacgaaaagacggccccgacgatgaagcccgtcggggcggtgaggccgaatatcgaaaagacgaggttcttgcgtggagatgggggataagctcggccgagcagggctacaccgttgggaaggagaaaggccggaccgatcccttgcatcgctcgcatcgtgtcgaaaaagatgtcgggatgtggtttcacgtagatcgagaagcctgtgggcgtcaaaaagatgcgtaccaagttagtactttcgtacgtatcgttgaaaagtccggcaagcaggctcatgactcgcctcctatcaagctccaaaatccgtaccagatccaaccaaagatgaccgcccgtttatgtccgtagagatccccgatcctgcccgccatgaggatgaaggtacctaccgtcaagctgtacgcggcgggcgaccaactgagatatgccggttcgccgccgatgcccagatcgtccccgatgatgtgcagcggggcgatggacatggccagcccgctctgagtaaacagttgacaggccgagacgacgctgacaaaggcgatctcgcgggtaagagagagggaatggaccgtccatacttcctcgtcttctagcttgccttcgtcgaccacgtcggtatctcgagccgtcttgttggactttgccgacatttcgtgagcagcgggtctgtggtaatgattggtttgattatatctttccgatcgacccgccgtctaggaatgtgggtggatatcgaggctcatatgcagacagtccaaaagagattgcagacgaatctcgattactgcgccgtggttatatatgcttctatcaatgaggcatgggatttacaaacgaacaagtatgaacatgatcgagtgcggcaccctccttggcttttagccgatggaaaattagcttccggggtgaatatgctcaacaagacatgacacgatgtgcggtcgtgccattacgtcccatttggcattcgctacaggagctcgagcaatagttacttagcaaaccaagtcgcggcgataatctttgtcacgtcgactatgccgatgagaaacatcgaacgatcaacgagcaacaaggtgattgatacggaccgtcttgttcaaaatctcatcgccaagtttacttttagcttccgaaggagcgctcgaatctggaatgttagtcgagacaccgacttggatctagggcactcgcttcaaagctcacagtcccgagcgcatactccttcgcagtcatgactagcccaccgactcaaagcccctttgaaacctgactgcgttgcgctctctgaccaatctttcccatcggcgaccaccataaaccgcgatcttttagcgccgaaccgagcgattcacaatcaaacacacgctcgtcaaaagttgttggctacggagtccggcgcaccgtcgcgtagcatgtcttgccgaaaaatggtaggttacggtcgaccagctctgtccatcgcttcagcacctcacaccatcttcttcctgaccttccatctcgtgcaccctaatgctctctacagcaaacaccccgggacgggtctagcatcttcgcttcgagccgagtgttggtcgagacgaaccagcgcacgagctcttctcattacctatgcatagacgcgtgctcgcacttatacattcatcatcctagcctaggggattgaacgctcatcgagcttcacgcgagaccaggcctgcaggcaaccacgtcccgacccttgtcctgaaatccacataatcctgtccaaagaacctgaccaagtgtctctcctcgtctgatcgtggccagccaaccatcacgcagaggttagtcagtgacctccccgtaaggctgtccgggacaggacggagggggcccggactcaccgatgatcctcgcttcgaaaaacttggccaggacgtagacgaagcctacgatgctgaccacgttaccgagcatcaactgggtggcgaccgcccagtaaaagaacccggtgtatgacggatgcctcgagaacctgttccgcatgtgcacggtcgtgggcgtgaggactcgctttctaataaagtcgatgggcgaaaaggtcgaacgacgggcgttttcgagactcaccggtacacgccccatgtgaccaggacgtgatcgtctgcctttttacctcgagagacttcgtgtgaaaaggaagacgaggcgtggaccatggcgagcgtcctcaacgcctgcgctgccatcaacatcggtagagctgttcgatcaaccataccgaaagttccccgcctctcagctgcctttcactttaggcgatcgaatccgagagacggtgagggggtggcatgctcaccaaagtacatccagccggatcgcatccaccatgaatcggaccggggccagaggtatgaccagaggaaccattcggccagtccaacggcgtgtgcgatcgggtacgccttgccgttgttcaacaagaaagctgaatgacaacagttgccccatcgatgacaacacagtacacacagtatcagtccctgatgtactgattgcagtcccatgcaaatattccgaccggccctcgtactcaccgtcgacggacaacctgtccttgttccacccagccgtcacccaaaactccatcaaatggaacccggccagacatcccaaatagactcccaactggggtctagcccacgctccccatccatcccgttgtagatctacccagtgggcgagagacagtccggcgagggtgaaagaggtgaagaggatccctccgaggatggtgcttatgatgctgacgctcaggggagtgttggggatatctccatgagctttgtaagccggggaggctgggagtaggggagcggaaatggaagacgtcgtcgactggaatacgtgtgccgggggaagaggctgggggatggtcgagttggagcttgtccgttgggtcaactggggggtgggtaatgacgaggtcgtcgcactcgagctcccgtttatcgttgttgctgacatgctgttcgggcagtggtcgaggtcgttacaagatggaatgcctgctgttaagcagggttcagcaagttgcaaacggtgtatgtcaaggagaacatctaggcagaactcactgctaactgaatcggcttcttaccagaagatgggcgtggttgtcgtgcttatttcgtcgtcactccggaaatcctgcgactcgtctatttagatctgcaaacccatctattccagaccaaggtttatttcatgttctacatgagagtgtgacaaaaggaaggctggcgacttgaatagacgaatgacaattgcagtcgaatgcatcgaacaaaaggggtcatccaccggctagcactactctccactttgctatcacgcggggtctccacaagtcacaacgacaacaacctccactcgccactcgtctcatgcctcagacctcgaactcggattctacccgtaacaactcgtccaatctgaccgtcgtactagacctcacatcgatcgttctcgcccttcgatggtgacccgtattcacagtcaatttcccatcacgctcgcgccgggcttcgaaagtaaacgtcggatcgagctcggccagacccgatcggaacctttgcagggctttgtacgtcgattcgtctgtcggtcgcctctcgatgggatcgcgatcctgattcccgagaagaggttgaggtcggtcgtttgagacgcggcgagcaattcggagcggagcgagaggtgccagaacgacgggggcgaagatcatctctacggtgacttgcgcttgatctgacttgcgagccagtatgtcggaccctcccttgctcgcctttgagcttccagcggcctgttctcctgctggccaggggaatactatcgagtttcttgattgagcccggtcatcaacgatatcgttcgacgtgtgcagaccatgaatctgggcattacgaacgcgctcgacgaccacctcaccataagcgatcccgtctggcagcgcaccctccatccgtccagagccgcaggccgtctccggggcgatcagactagcagtacatctgtctcgccccgtcgaattgcccttgctcgcaatcaaggattgtggctcgaactctactgaacgttcaagaatttcaaagtcgcaattgtctttctcgatcaactcggccgggatactgcgcggacggcgatgacatccctctggacgctcctcggcgactttttcaagtggaaaccttatttctccttcaactcgatcttgtttccccatggcgcacgaccgagtatgaccggagaggacgaccgactgaataccgccagatgactcaacaccgtccctaccttcgaggttccctgcgcctggacccgacttgtccatgcgggtcgagtcaggcggaccgactttcgcgatgtcgattcctaacgccttttcttctggcagttggatggcgtcggtctcaggctcatcggaggcctcccccgtgatcacctgtttctcgccggtcccggggacgtctgatttggtattggctgtctcgaacggcccgtcgtcagattcgggatcgtcgctatgctcggtctcgtcatggtcagcgtcagcgtcatcctcacccgtgtcatcgtcggggtcatgtgaagccttgtcccatgccagcgtactctgacgcccacccaacctggccctcttattgccactcgacgataggtcccggggacgaccagtactaggctccacctcccgagtttgaacgcccacgtccctggtgctggccgactttctcgagatctccggggcaagctcaatctttggctcaccgcctgttcgtgaggtagacttcgtcccgaatgtcttgccaccgggttgagctgcccctcggtcgagatccttatgacgacaataacacctgccgaaaccacctatgtcgatcacgcgggatctgctctgaccccgaccggacacttctgagtacaggacgagcgcgatcttgaggcatcttcctacccatctcccccacccgtaccagtctgaccatcccgaagtccctatccgaccgatgcccgtcgacccggtccggacctggacctgtccgcctggatacgcatctccgtgggcccagatcgaggtcgggtgagagtgaaagctgggggggaagacggtatctagggttgtcaacaggaagacgagctcgacggctttcatacccccaggtttaggtcgtgcggttgcggttacggttgctgttgctgttgatgatatcgcgggatctcgctcagtgctgacgacctggcaaacccgcctccagatccaagcccggacggcccagtccaccgccatctccatccagtcccagtcccaacgccaatcccaatccccattccaatcccgagcccagtaccaatagtccgacctgacttgcagggtatgcaacgccactcccaagctgaggacggtgagggtggatatgaccgcggtttccgtacgtgagaggtctagctgggggatcagggtggggcgggggtggacgagaggttggatctgttgcgggattggaggtccaattcgatgtcgaattcgaggttgagattcgatacgggacatgtcgtttgggggtggtgcatttcgagaggtgaggatcagccgtttggtgtcgacgaaccactcagggaggcgcagcgtgaacgccaagaaggcgatgtcataccctgctaaactcactgatctcataaacgccgcaaagagcattcgaagctgtacatgaaagggaacgtgatcgtcgaacggtggttgtgcgtgacggggcatctctgtggacatgatattgtagcgcgcggcgaggagatggtgatagccgagcattggcgcggggtaaatacgagagtacgattcgggtctttgagactggtaagatttggtcgcaagtttatattcaaatgggcgatgcgacacgggtttggtctgtgactctgtatagtttcattgcatttgaaacgtataggccgcccctttctttccccctgtgtgagcgtttcaacgtgaccagacgcgggttggtgggtggtttgttgacttgatttgaaatgacaccaggtcaacttttgcgtgttcaaggtggatttaagcacgcgcttaacgtgtcgtcacggcacgcgcgggtaagcttgcgcttttattttggtcgctctttttggtttttccaccgatacacacacacacgcacacgcgctcgtcggacctagcagggaggaccacggcaaccaaagacgatcaacctagagacagatccgagttgatggcctggcgtacaacatcgtatccccttgcgttcggacagcacccttttctttcactttagacggtagagtactcacccaaaaaagaaccaccaccaggtcagttacccccgtttgcgctgccctcgaccgacagacgacccagccagctcactcactctcgaccctgcccgcccaaactcgcagcaaccatggcttcttacacttccaaggttcagcgtaccgccaacgcccccgccggtcccgccgacgagatcgaaaagaccgtcgcccaggccatcttggacttggagaccaacgtccccgagctcaagtccgagttgcagcagctcgccatctcggccgccaaagaggtcgacgtcaagggtgggaaaaaggccatcgtcgtctttgtccccgtgcccatgctcaaggctttccacaaggttcaacagaggtgagtcggccgtcccgagccgggttgtgggtcttattaccgtcgtcttctttccccaaaccctacgtacgagaaaggccacttcaccccatcgcatcgcatcgcatcgcatcgcatcgcatcgcatcgcatcgctcccctggacccccacgacatacctccctcctagccgcgtcgatatgggtagacgccgtacacaacaaaagaccaccggggacgaccttgacaccctctgtgggggagggacgaggggtagacggcgagacttttcaggctcgcctcccctaataatatcgtcccccccacaatcgtgtcacccgggggtgggcgggtcattcgttcttcttctcccttgccttgccttgcctgcttggacacttgcgtgtcgaggccaggcgagggggtgggggggagaggacggttgacccgtcttggtcgtccccctcctggtttccacctgtcggtccctcgaggaaaaggaaggaaggaaggaaggaagcgtggacggatggagagcgtatcccttgtccgcttgatcctgggtcgaagcgtcatcttccgccctcgcctacacgtacgtacgtgtaggcgggtcggaaggacgtagatgtgagatccaggtcgggttcggaagggacgtcttttcatcctctcttctcttttccttcccttcccttttccgagggggatcgcgagtggaaggtctttcggcggtcgatgatcccagtcggatcattttcatcaggaaaaggcaggcccgaaaacgcagaggtcggggtgccgagtctcggtcgtctgcttgtttccccctcttttgtttttcgaatcggcggttgtcttctcgttcccttgcgcgttcgctcctccgcttcggtccgatgtcgatacggttggtccttttcctgggggaacattcgtgtcggtcggtcgggcagaggtacgatggagcgtgtgttagagggacgagcagcagacgagtcgagacgagacgggacgagatgaaaagcggcgaccatgaaacgaggctcgagctcggacctctcttttccctgacttccctgatgaaagaggctggacggagagatagacctcgaacccccactcgtgacgagtgaagagggagagggagaagaatacacacatccacgcgacgaacggaacgatttttgtttaaaaggggacgagggactgatcgagattacctccttgcctcgtcactatttttccccactcgacccatcacgatcgcactcgatcgcccgctcgcctgcccgccacgctgtgctcgccacgctcgcactcgcaggctcacccgagagctcgagaagaagctctctgaccgatacgtcgtctttgtcgcccaacgacgagtccttcccaagcccaagaagggaaccaagtctacccagaagcgaccccgatcgaggaccttgaccgctgtccacgagaagatcttggaggacttggtcttcccctcggagattgtcggaaagaggacccgggtcggtgtcgacggttccaagttgatcagggcgtgagtcacatggtggtgggggcagacgcaaaacgtgctgacgtgagggacgcccgggtgatgctagtttcctcgacaacaaggaccagaacctcctcgagtacaagctcgacacctttacctcggtttacaagaacctcaccggttagtccccggcgggtcgagctccgcgtcaacgcgtccgtggtccgtatactgacggtgattttgcgacctatgccgcgttacccgggcgctttgtaggaaaggacgtccacttctccttccccgtagagcagcaacagtaaacctgtcgctcgatccgacaccccttcgcccatccatcacacacactctcccacccgcccccctcggcttctcgaacgcatcgcgtgtcgtcgaaaattttgtagctcctctacgtgtttattccggggtcttttgaaccatgcatgtttgaattccgaggggtacccaattttttctccgaaagagatcgaaggcgcaagtgaggatcgatcgatggtcaacaagtcccgccgggggctatgagcgtcgtcggtgtgtgcttcagctttgttggtggtggtggtggtggctgagggccgtctcggtgtcgtttgaatgggaatccggtgacggggtgactgctgcaggtgaagagtgcagtggatgatgtgattccgtgtccgtgtccgtgttttccgtgaattgtggtcgctcgctttcactttcgtttcggttaaatacacacacacacactgcaaccttggcggcgatcgaccgatcatccgttcggggttgggtcgtctgctggctgctgctggtgggtatcgtcaggagcaagagcaagagtcgctatatccctttggcttgaacactggctggaatgacgtcttctaactcgtgatcatgaatgcacatcaagaagctcatcaccatcgtcgtcgacaccaccacactctcactactaccactactactatctactccagcaccaccacatcatcgacatcccgacaacagtcatgacgggttatgacgatgttactacgtgcccggacgaccgacgcatgagccctcctttcgacctcgattccacgacgtacggtcaactcaacttcttgcaacgacccgacacgccacccaggtctcccacggggagttcctttacgttcacctcgagcatgcatacgagaccgtgagtccggtgggctaagctcgattgtcgtccggccgtaaagagcacccgctgaactgacctagctcgatctggggggtcatcttggcaggttcagggaagatggaggaagactctacaatgcggctcaggacgactatgctttaccggcggatatgcaagaaatcaatgtgagcttcctctttcccatatcacggtcctaaccttcctgccattctcctgctaaagatcccgccccgccctccttctgtcacagcgcttgaacacccaacacgtagcctaccgcaaggtgagacgaccttgccctaccgccttcgacccctcctcgtcgtactgaactgaacatcaaaccgggtccccattactcttcctatatacaatagcgggtaggacgaaactacatcggacccctggatgaaaacctgcgggacggtgctgggaaaaaggtcctggatatcggatgcggtacgtcctcctcttaccttttctcttcattgggaaaaacagcccgtctgattagcgccttgctgtcgtgttccgtaggtaccggtctttggtgagcgagatgactggggtaccgtctaaaggtcgttgggtgggtataccggcctgatcacatcttgttcctcatgtggggcatcagggctatcgaagtgggtcgaactttccctcaagtagaattcgtagggatcgacctggtccctatccaacccaagtgagcttttggatcgagaccccctgagtctttcccgagctgatttccatgtcatacccttgtcgaccccgcccggattcgtagcaacgacgaggtccccgagaacgtctctttcgttcaagacgatgtgaccagaggattgcctttccctgacgcatcgatcgatgtcgttcacgctagactgctcgtcgccggggtgagtgcctgtttttccgttcccccgggtcacctctttgcgtgcgcatacggtcgactcatcgcgccgtcgtcgacctcgatcgtcttatctccagatccgagactaccccgctctcgtcaaagagatcgctcgggtgcttaaaccgggcggtctctatctctttatcgagggtggtttcctcgacgcaggggatcttcgggacttggactcgatcagggcggacatggcgagacaacagaacattagcgaaaacttgcgtaggttggcccccggtgtcgctgcttggatcgaattgacatcaaagtgagccatctcggtttccgtgtcgtccacgaacccctctcgttccccgttcgtggacgggtcagtgctcaccgcctttgcatgcgtccagggcgttcacgaaacgcggtctcgatccgcaagccgggttcaacgtccccgagacggtgcgcaagaacggatcgtttggacagattcaaacgaccctggtcgacctgcccatgtccccttggtcgacggacccgacgctgcgcaaggtcggcaagttgatgtatgcggattcgagtcaaatgcccgaggtcagtcttcgcccttcgtctggttcgtatcgacacggcgtaaaccggaattgacaaccccgacgatccaggcgtcgaaactcttggtcatcgatggtctcaatatcgatcccaacgagtacgccgaggtctcggcgagattcctgagcgatctcaatgatctctccaccaagctcgtcatgcacttcccggctcactggaccatcaagacgtcttcctgatccgttccccagcctcaccgagactacccaagcctccagattgatcgcgactgatttattcgattcggctagacgatacaacgacgagctaatatgtacaacagagctttgggcttcgagggttggcaagatgatgcgagtgtggacaagatcgtcacggtaatgctgagagggagagagagaatggaaagttccccgggtccacccggttgatgtttctgtgtgtgcttgtgttatttacgacgacgacgacgtatacgatatacccttctgctagccaacgcgatgttttaatcgtccatggccccagcgacgaggtcgtcttcccatgattcttcgtgattcatcccctgatcctccgaatggaccagcaggccggcctcgggatctcgattgccctccgcttggcgctcttcatgacgatacttctgatgactatgcctacggttcttgacggcagacgcaacgacccgtatcggctggacccgccattgagttttatcgcccccatagctcccgttaggcaaggcgggaatgatcggggacgccaaagacacgtcgagatcgtgcgtcagagcgttccgtatgtgatttggatcgccttgatcgatcacttcgacttgccgtcggaattgaagcgtgtaaggatgactacctgatggccaagccgaaaaggtgaacatcctgtccttgtagatgctaggggggacgtctagcgcggaaaaggtcgcgacctcgacctgggaaaagggatgtccactgacaatcatatgccgtttaggacctggatgaagcaatcgcaatgacaagagtgtgacttacttggtgtgacgagccgttttgcgttctggcccagtatccttcatctccctcctgacatcggcttcgggcagattccgtggtaacctccacagagcggttacaaccggaagaatctcttcctgcctctcgaccggaggaacggctagcttgaagaccgaaactttacccaacgtgttctgcgtcgggtcgtagatcgcgacagaaaattgagctgtcgaagcgctatctgaagacaccggtataaagtggagcaaagaagccccgactcgctcgatcatcggcgatagtcccttgctttcagtagacacccagtcggaagttcgtatctttgtcgcagttgatgccttgttgttcaaggagagttgaacggctgccgtctcgatcgaaaacacgtctgttggacaagtcgttagtcaaagcactactgatgagaccgagctttcaaggcttacggctggtcttgcggcttgtcacgccgaccgtcttgccactctgatcccatacgatctgactgatcctggccggagtaacgccccgcttgagctgatgctgcaaccagacttgaccaaggcaatcgtctgtcgatccgagccgtcgagttgtagcggcggacattcgaatttcgacgactgagactatcttgccttccgatgtaccaatggctaatcgcgtaccgagggcggagaaagccatgatatcgattgtgggcagggcgttccccggcagcgacacattctcgatcaagggcagagcgaaatgcgcgacgaggctaggtcggcatttgtcgtgcccgagagtggaagcaacgggccgtcgagattcgactagcctcccgaggtcgatgattttgatccacgaggctccacgatgacgccgcgagcgcggagtggtggccaggccgccgcttccgagtccacccgagcctgcagcttggccttggagctttggatgcccaggactcgctgcagagtcgctcgagaatctcttggcgaattcgcttacgaccggggcgctcttgctcaatgcttctgaccgactcgcaccatccactgcggcccgcccaaatcctttcagtccgctccaaacccccttggcgacctcggaagagatcccagccgccgtcgtcatcatcatcgcttgcatcgaaggcagagactcgggactgtaccgctcgtcgatgggtgacgatcctgctctggataaacgtgtctctacgatcgcctgtcgcttccactcggtagccgccttgacggacctctgcgtgactatacttccgtgtttcagttcttccaagcgatcgtacctttccacgccgcttctagccgagtgcatagtcacataagccaagagtctgccctgaagcgttgcgacgggtagtccggatcgagtattgacaccgacgtcctcgttgatggatctacacaacggctcgaaagattccgcctgaaggaacgagatggatggcgatttccccgctagggtctgcaagaggtcttggacggtcaggactaggaacggctggccagagccggatataccgatcaggacttgccagtacgatgcgatcgtttgagatcaagattctcccgtctctgccctgcccgcaatcgcgttccagctcgacctcgtcagtatatgggttgactctctcgagcctgatggtcgactcatcgattccagtgtggcctttgaacatgattctataacatgcgaggatcagctggtgcccatctccatcccacagccacgatcaacttgcaatcgaaccaatctcaatccctcggccgcacccacaagagccgcatccaacgcccacgtttcccgttgggctttccagctaaagacttcttgtggtccgttctcccatacgacgcttcccttgatatcgccacctccctgaacgcctgcattgcccacgcccgcgcagtcccacaccctgagcgccgtcagaggatccgggtggaactccatcaataggggtgattcttgttcgtcattgccttgcaagtgagctcgggtccagcaagtcctcgtatacgtcttcgaggcggacccattctccgcttcccctcgtccgccatgatcgagttcgagatcctcgatcaacgagaacccatcctccttttccctttcatcggcttcgtcatcactggcttccggtgccaagagggacgtctcctgagccttcttctgacctttgggagtgaagaggtacttgctccatcgctccaacgagggcaaggggttgggaagcggaaagacaaggttgaggtggagagaatctagttgtccgttcagcgaacgcatgaggttcagggaaggtggtctgaaagcgtacgtctcgatcagttgtcgtcttcacgtcagccaagacggtcgtttcctattgcttacgggatcgggaccgctgtttaaggacgcgacatgaccgtcaagatcagccccataccagcgacagacctatcactacagactctcgccactcacgaactcctctgacagcggtcctgcgccctcgcggcgcattatccgtcaggttcttcctgactggaactcccttttcatgcctgccgatgacctgtccatctagcccgtaaacctcttccctcgcctctccacccgttccaccccgtgccatccgatcatcgcgcgttcgaccttctctcctagcgatcgtcgcgtcctgttcatcccggtgacgatcttgaacggcagtacgatctttcacgctcatcagcccgggtgggcggacgggggaagaagaagcagatcccgcgggtgtctctgtagggctggatgaaggggtcgacgaggtggcgatggaacgagagtcggtcgtcgaaggtgcaggtgagataaggtggtggatgtcacttttctgctggattccgacgtcgaggtcgcggtcgaggtcgagttcctcgtctttgcgaccgacgctgggtgtgggcatcctcgccggagttcccgccccagacccgccagacccgccagacccggcgcgactcccggttcctcctgctgaaggtttcttatacccccgaataggcatccccgtgtgtagctctccttgtattcacgctccgtatagggatcgatcagggggaggagatgtgtgcgatgtttcgtggttgaagggcagacgaaatgatggatgcgtggacgatccgttcaacccatatttctaggtggtacccatggcaagtcgagcggttctcagcacgtcatcttaatcgtcgtactgatttggtagtggaatatcagggtcgatctaggagaacgtaaatcgatgaatgacgatcaagtcgaggtcgcgctggaggcggtgtttgttatctatccgtgttttcggcgtgatcccgacaaagggccgagtcggggatgattgacggatggacgggtgaagactttgtctttcgttctgaaaagcagctgtaggcaaattgaagtggcgaatgggttgggatgttgatcacgggtcagtgtggtaagtgaatgatggtcgtagatgacctgaaccggacgaggcgatgatgatgatgatgatgatgaatggtggtggtgaccccggggaccgcgagccccgctgctgccgtttcggcaatcgtgaacgagtttcggatgtaaattaggttccgcatagcctacctctctcctcttccgccttctcctcctgctcgataacgacctttgcgcagatggtcagcatctcagatgaccctgttgaaatacgtggcgtgcttcaacacgatcgcagcacactaaatacgtagagctaagcttcaacccttggttaatacctggccagatcatcatacggtgtcgccatattgactatcagctgcactcgccatctccgtgattccttgttgacaaccgccggagaccgctggaggaccgtgagtcgataacgtaatgtcgatcatctgatggatagcgggatcagatttcactcgaccgtctggtcggagacaaccgagcaagttcgagctacttgttatacgagcgatctatagggcacgatgacttgaatggccagtttttcttgtatatatagcttgagagccgactcgcgactcgctcctcacacgcagcaatcgcctatcaagccgccagatcgcctggagccagaatctactcttcgcaccatgactgtcgacccccagagtcactcgcaagccaccctctgcgttcacgccgatgacccgctcaacaccctccccgcttcggtcgacggcgagatcaccgatgtagctcccgctttgcatgtcagtacgacgtataggttcagtaagaacccggaccatctcgtcgaagccaaggattgcgatgtacgtcgagtgatcaggctcgctgttgcttcggtcgcgctgaggagaacctttttctctctccctctttctctcgcgatagctcttcactctagacacccacgtctactcgcgggagacgactccgaacagtactcgattggaagccatcctctcatccatcactggcggccgagcattgtgttacagttcgggactcagcgccatctttgccgcttacgtgagtcatctcaccctcactcggtttacaatcgataacgttcatccgtactgacaccccggacgaaacagatctacctgaagccgaagaaagtctccatcgggggtggataccatgggacacacggggtactcgccattcatcatcgtttgacgggggtgaccaagatcccactggactgtcctgccgatgacctcggcccgggcgacgtgatccacatcgagacccctttcaatccgacgggggaagcgtacgatctgagctattacgcggaaaaggctcattctcgaggagcttacctggtcgtcgatgccacgtttgggcctcctggtttacaagaccctttcaagcatggggcggacgtcgtcatgcattcgggtaccaagtatttcggtggacacagtgatctcctctgcggcgtcctcgtcacgcagaaggaagagtggtacaagggtctgtggatggaccggatggatttgggcagcgtgatgggtaacatggagagctggttgacggtccgttcgttgaggacgctcgaactccgggtgacgaggcagagcaaaaacgccgaccggatcgtcgactggctcgacaaggggatgaacgacggatccaccagtaccgacagcggcgagaacgctgcgaaagacgtctcactgatcaagacccagatcaccaagctgtaccacgcttccctacaagcccgggatccggccaacacgtggctcaagacgcaaatgccaaacgggtacggtcccgtctttgcgctacaccttgccaccccagaaatggcccgtcggttcccctcttacctcgaactcttccatcacgccacttccctgggcggagtagagagtctggtagaatggcgggcgatgagcgatgatacgatcgacaggcggttggtcaggtttagcatcggggtggaagacgtcgaggacctcatccaggatatcaggcaggcgttggtgaagttggaggcgtggagcaaggagcaggaacagaagtgaggatcaggtgtcagtggaccgtcctcgcgcgtgaaccagggttcatagggtttgtttggtggtcttgtcgattgtatagttcagacggaatgttcagcaccactcctaattttcgattcaacattgagccattcggcggctgatcgatgacacgttcttgacaatcaccgaagggcacaatgagaacgcttgtcgagaggatacccatgatgagtctgatgtaaccgttccgagaggatcgcttggctacctcacacgcacaagaggttcattccgcgcgaaaagccttgaaggtgaccgtggtccgcaattatatcaactgcttcaagtcaagtctctcaacggctgatcgggtgcttcagtaagccacgaccccctgtgtgtcgggttgagctttacgagatttaggcttaccgaatatcttgaccggtctgaaggatctccatacggcagaagatctggaaaaaaacgtcgaaaagaataatggagagctggccaaggaggtctcggactttcggggactcgatcattgatcattcgtcaacatccattggcggatgtcttgaaattgcttagtcgagaacaccttctctggggcagagtcgatgtggctgcccatcaagttgcggtcaacctggagtcatcatcgccatccgtaacactcgtcgcctttgcacaaacttcggcggttcgcttcttggacggggatgatcgaggtcgagagggaccagcgtttgctcagagaggttggcatcagaatgtcgtgtgctgctcaacgttgtccgtatcatttgcctttttcacttggaaacggcggtggcaaaacgtggaaagctgtggggatgcctaccggaagggtcaggagggatgagatcgagtaaccaattccggcaccagttccatcatcgcctttatggatattcgcatagggacaatcatctatacccctccacggcggatcatgtcgcgtcgcagtcttgagctcggtgtcacagcctggactttgtttcacggggcatcttacgcaaaaacagggagaaggtggcagtcgttctgtccttcaccgaagcagctcctcaacagacccgccggtttcttagaagatcgtcgatatcccttcgggcaaactttcggaccatcttggcacaatgtttgatttccgaacgcatgagatgcgacagcccgtttcagacgctggcttttgcagcggatcaggtcgcagaaagcgggagtgaggtgtttaatcaatcacacgtcataatttcaagtcatcccagtagccaactcgtcagaatcaatgaagcctgcatatcttatcaaaataaatgctcgagacgctcaatcagccgtcgtgagtgcggaccgggtgagatcttataaagtgttacacgatcaccccgacaagggattacccatcttgtttaaacatgtcgtgacgacacttctcacagccagcattgagctcctccacctaccttcaatacttgtcgtcgtccttggacctgctcaactcgatgccactcggtctttccagtaatgtgttgcgaatccatcacaacgtcagtctggaaacaccttgccgggtcgagtctgagatcgggcccctcgaaaagacttgatgaggatgcgagaacagaatctcatagagcggggagaagagtggctcgaagctctcgaatatatggccgttgcacgaaagccaaaacggtatcgtgtcaaggaccgctccgcgtcatcccttccaagcactcccagcagggcttcggcttcaggagtcgccgcaaggctggtgcacaaactaccaagacattcacggtcgtcttcgtcaccagccagaagcgttccaacgaatagagccttgccattccgtaagtatcgatcgccccccttccttggctgtgagtcttatctgacgttgcctcttctatgatcgttgcagatcttccccgttccatatcgcttcttctcttctatccccgtctttcaacccatctcctgttctgaaccgcacgcacgcacgcccgcaagcacacacgcacacacatacgtagaaccgagtcatccccgcgatgatgcccaaagctagtaaaaggtgtgagacaccccgccttctagaccctctcttctttcctgctccgcctttcccctttgctttcccgctctggatcctacccaaacggtgcttccccggcttctccctctcacctttatcgcgacgaatgaaccctgatgatggaagatggacggaccgagtagcccctcccgtcgcattcccattgcaatacagacgcggagcgaggtgtcctttagcacggctctcgtccacgagtacaacatggacggagtgggaataccaaagataaagtcgggcttaaaccccgcttgatctattcccggagttgtaaggcaggacgaacaaatcatctctttgtcctcttgatccctcgtcgggacgtcctcttccgggagagaagtacgacgaggactcgaggataagcgctcggaagtagacgacccttttcctcctgcccttgccccggctcactttcttacgaaggatagtctgggaatcgcagcatgacggggaacactcaggggtcgtaaaggccgagcggacaatgaccaccacaaaagaaaaagaaaaacatacgtctaggtaaaaaagccaagcgcgctcgtcgacgaggatcatgacgatgctgcgtgaaatgttggacggaaatcagggggtcgatggtcagaccccgtcttcccaccggaaacggaacgatcagggtgaactaggggggtcttttttcccgtctttcgacccttgggggaaatgtctcggaaggtttctctctctcgtctgatcggggggtctgcgctctttgctagggattcgggaggatggtttcgggcgttccgtgtggatcgaatccctctgcggaatagaaccctggcgcccggatcgttcccccgattctctttcatcgagattcacgcagactcgtcgagtcttggcataggagggaagcatcgaggtctgtgtacccaggtgaaggagacgttatggggaggtagaccctcctctctctgttcgtgggaagtcgcacgagcaacagctgaaccgagatctcggtcccgtttcgtcgcaagacgcgggaagaatcgtctcttggatcggtatatgaatcgagcggacaacgcaccaaaaggacgtccagcgacctgatgtcgacggcttgttcgaagaacgaattggtgggcaaggagaaaggttcagggaggtaccggggatcctgaaacgggactgtctaggtggagtggtggtagcaggacgaagaggtttagggtctgggaacggggggtgttgcaagaacacgactcggtccgtctgggacatgcgtggttcggacttatcctcttttctgcgaggaaaggaggatgggcgagacccactgagcggacgacaggatgactttggttctgcgtgcgtgtgtccgtgcgttcgtgcgtgtgcttgcttgcttttgactgtgcgacatggtataagacatggcttggagtacgtatagaagtagtttagtagcgtatgactatgatgatttcgcgtcatttatcaaattactctggtttcccgctcaaacgcgtctcttttaacgaaacgagcgagtttccctttcgagccagagaggacacagagagtcgactataggtaacgtagttgtcttcatagaggtcgggtcacaacctgcatgctgcatgtcacttcgcagcactcggtcagtcagtactattttgacatagtccaaccacctctcgagacgaacccggtgatcttgagcgagagagtcaccgatcactttcaaccccggatcggctaaatctgcatgacgacgacgtacgccgaacaataaataaataaataaataaataaataggtccctccagactttcgaccactcggtagcacattgctcatatccatcgaggtcaacgaggtactagagccgactagctggagtcgtcgggtcggtccagcccgggaaaggatatggatcaacaacagccgggtcaggctgggattgcgacggtcgacgggcagacgaacgggggtcacatcggatccgtcaacggagatcatgccggtgtgcagcacggcacgccgtccagatcggacaagcaattggatctcaatccaggcaacatctcgaccgaggacgtttcggtacccgtacctcttgcatctgcatcgctccagccaccacctttcgcttctacatctcaatccagccagccgacaaatacaggtccatctcaagaagccgcatcatcaacaacccccgtccttggctctagctcacaaccacctgtagaccccaacacgccccgtcaagcacctcatccggacgctcctctcccacctgcactgcaagctcagttctacgctcggttccggattcaacctcctcagactcatggacagcttcaacagttccttcgacaggccgcccaggcccaagctgcgtttcaagcgagatcggcgaatatggctgcagccaggcctggtgatgtaccggcaggttcagaaccaggttccacgacgagcagtacgaatccgaatccgaacccgagctcgagcgggaaccccttgccggcgactaacgcgaaccatcattcgagttccggacccggtacaccccaaagcggactagtcgagcagggcgtgaacggcagtgtcggggtcccaccagctccctctgaacaagctcaaaagtcgggaacgccgaacacgcccaacttggccgtcgaccctgtggggacacctcggagcgggaacttgtctttccaacctggaccgtctgggtctgttgagcagactgcaggtcagaccactcagggtcaggagaccacgcctggtgcgccttgtaagcttggacgtcgtctgccctcgcctgtccctttcgctaacacgttccggtgccgctcatcccgcctcagcggagtcagagttgacgaggctctcatcgtccgacgtctcttccttccgaccacgtcaactatccggttcagataggggagagatccacgccgcgctcgcttctgtgggcaagtcccccgctgggtctggactcgctctcggagtaggtcccggaggaggagccggaccgcatttcgatggtctgggcaggttgccagctgggatggatatggacgcgatcagaaaacaagtcagtcgattcagcatcacccatcccggcttcgctacgcggtcagagttaacaggcgtccctcgggtttctagatgcaagcgttgagagaatcgcagaatcgacgtagcagcgcttcatcacaacatcatcccatgataggcatgtctcccgggtacaaccggacctcgaaccccctcggccaggctgggatgggatccagtgcgatcgccaacagtccactcgatactgctggagcatcgggaagtagcccggcggtggtaccggatgtcaatatcgagaagagcgggaacgaccaaggacctccagaggttgggccaggtcccagcgggatggagaatgggtcgaacgggttggaaaacagaagggtatcccagcaaggcggtcctggtgcgtctcacctatgattgtgtgctgtacgattgcgctcaacggagatctcttcatcgcagagaacgctccagggactccctcgtcagcatcaaacacgggagggtcgcagcacccacaccaacagcgacgtccgaccaatccgaatcaagcggcctttgcggctcattttctgaacagtctgaaacagttcgtctcttcgagaaacatcaccgtgcccccaaaccttttcgacaacgagccagccgatccggaggtacctgggtcgactccgacgcagccgggtgtgatcgatgttcttgggaaaaaggtcgacttgttcaggctctactttacggtcattcagatgggtggatatgccaaggtgaatatccaaagtttccctcgtctcgcatcaccgcgtactgacgtcctcgatccatcttttcgcacgcacgctaggtcgcgaccattggtggctgggcaaaattggcggccgcttggggtttccctccattcctacccagtccatggacaatgcttccaggaagctcgcaagcgtcaaatcaacagcctcagctaacgaggaccaccactatccctggcgagatgttgatcaatatttacgagacgttgttgctcggatttgaagagcagtcgcggataggtcaggccgctcaagcagctaagatgcagcagcaacagggtcagacaccgcagggccaagcgccacaacttcctcccacaagcgaagcaatagtaccgacggcgaaatcgatgccaaccgaggatcgggatccgtccaggtcgaagcagccagaaaatagcggggatttggcaaaaggcgatcttgcgtcgaccgcagatgttctgccgatacagcctgtcacctcaaacgcggtcgcaccagagcctaccctgaagctagaagaacccgcacctctacctagtcagtcgcccgccaataaccctcaagctggcccttcgtctcgtccgacttcgcgggccgggtccaccttgtcacagataggacccggatcttcctcgacgtcaaatcgacccgaaggcgagatgctcgcccacagacaacgtatgctcttacaggctcagacaaaagccatgctgcagggggtaccaagtccgagtctctcagtacgttcaggtcaagaaggtggacccagcagcaccggtcagtacgacagtcttcaagggaacctggccgggcatgatggcgctatgaacggttcagatcgctctgtcggccacgatgcatcgacaggtgcgtaagatccggccacgatttctgaaaacttgtgcttacaaattggcgtttcatggctgcatcttagcgaaacgaaaagtgagccgcgaatcgacagaagcgatacattgtcgtgatgctgacgtatatgtctgacacctgtacagcttgccgacatccccgtgccacgcgaaaagacccccgaaccactaccgaaacgggtgcgctacaagatcgaatatagaccgctcagccggatggtggatgcacatggaggctgggacattgaagccgtggctctcgcacaccgcgacaatgctcttgcacgggaagccctggtggtggaagaccttggacgggtcgatatcgaggctctctcgatgagtatacgctcacgaataccttcagaaatctcttatgcattgacagtgctcggcatgttgtccatgccgggcaagggtgaggataagggcggtctgggcctaggtcactgcggagatctgcttgatgacctggtcgatctcgtcgaagaggaaacgttcggagaagacggctggcaagagtgggcggaaagactcgacgcggtaccagctcctggcagagtcgaaatccgcaagacctcccataccgatctactcgtgtcggctcaattcgaggcctatagctgccaggactcgctgcaaaactcatcgtcgcgtcgcgtcgaggtcgtgctactagtcatcagtcttttacggaacttttcactcatggcagacaactacaccatcatgacgcaacacgcccgctttgtcgagattatgatccgggtctgcgaccctcgacttaccttgccagtctcatccgcaccgaccggtcttgagggcccagcctcgtttggcaaagccgatcatcttcggatacgggaggacgtcttggacatcttccatggactgtcgttcagcctcaacctgactgttctgcctctggatgccgtcggcctcatggtagaactcgcgctatcgcatctcaaaggatcgcagaccggatcgatcagcgatcgcttgttccggggacccgccgaccacctggacatgccggacaaggccatactctcgctcgaagtcttgacgcagacgtcgtgctctgatcagaaccgacgtgtcctgcgacgactcgaaggagacgtcattctggaaggcttcgtgacctgcctcaaatacctcgcttttgacgaaaaggacgccaagatgctcatgcactaccctcccatgttggatgtacaagtcaagctggctttctgtctctacaatttcgcctttgtggcctctctccccatcagggctcgtctacgggagaccgttggagtactctctgtgctcggtaccagcatccacttactcagtcgagcacctccgcttcacccttacgccgtcatggttcgttgtttgagcgagacaataggcgttctgaacggaccggacgatctcatgggggaacggcgacaactgactttcggcccggctgccagtgctcggggtctgaaaggttggaatgacgctcaggatgtaatggaacaaggtatcctggctgcatacgaggatcgtctgttggtcgatttcctggcggtcggccgagccgcaggacagctggacagagcgacattcgaggcactttcgagatcggtctgggcattgtaatggtaacgagagactggtcacacgaaattctgacacggcgatcctgtacatggggtgatagtctagaagcggtgatcgagtaagctcaactaatgtgtagtcatgtaatactcgacccgtgacgctagcggtgaaggctgaatgggaaggaccgaagctagggcatggatgtgcttgctaagaggcagattcagaagcgggcattgacgtatcgatcgatccagagatggccgctgttttgacgggaccgtttccttgtacggcatccaatcagagcgggtgatcgcttgctggcccgcggccatacggcagcggcgcgggaaaacagcggatccaggagaaaggaagctcgccgatcgtacccacttggttgaacggaacttttccgcacgtgggacgcaattacgcaatgtggatccctacccaaccatatcgttgtcgctaagatattgttgttcgtgctcgaggcagtttcatggaattggtggatcaaaagtgtttggcttgagcgtttagaccgactgaacgctggctgacttccgcgagccacttcaaccacaaatgagacgtatgcggttctctgcaaatggctgaagcgaaaagatactccgttaaactggtactcgacgtcgcttatctgacgggcgcgggcacgggcatcgttgcttgctcgatgcgatgaatattgtagtgaccaagcttgatcacttcgttacaggcatctcggcgagagaatagtagtatataacaatgactgtatcactgcacttgatctgatctgcaacgaacagtgtaattcctaaacacaatcacctactgctgtaccaaacgttcacaaccatgttgttgaccgcgtcaagcgacaagttcctctcggacagcaagagagcatattcttatgaagatgataccgaaatagatgaacacagccgtacggctaccatctcagagcctcttaaaccctgggcgatggagggcgatgtaagttgatcttgctattcgaccccatgcctgcccgatggctgaaccgatagtcgatgcggaaaaacgaaaggtactaaggatcaaagaagagtatgaggcagccggataccccgccaaacgtcttggagtatcttgggagaatctcactgtgaaaggaaaggcatccggagccgttcttcatgatacggttctttccatcttcaacctacctgagaagatcaaaaccggccgtcgtccaacgcaagaacaagtgatactcgacgataacttcggttgcgtccgtcccgggcaggtcctgcttgtcctagctcgcccaggaggaggctcgacaaccctgttgaaagttctcgccaatgcgcgggagggatattccagtatcgaaggcgatgtctggtacgggaacatggaccacaagcaggctcgcgaattccgcggcgagatcgtcatgaacggggaggaggtaagtcacttcaccatcgaaaacgttatcacggtcttacgctgatgcgattgtgtcattggtaggaaatcttctatccccacatgacggtcggccagacgatcgaattcgcgactgcccttaaaacccctgcgcacgcctccaaggacaaagctagccgcatcgatcatcgggaaaagaccatcgacttcctattgaggagtatggccatctctcacacgaaggatactaccgttggaaacgaatacatccgaggggtcagtggaggtgaacgtaggaggctgtcaatcattgagacactcgcgacgcgcgcagctgtcgtctgttgggataacagtactcgaggtaagccttgaggatgccccattccggttcgaatttcatgactaatcttctctgagagagtaggactagacgcttcgaccgctttgaactgggcccaggcggtccgtaccattacggatgcactgggtctggcttccatcatgactctgtaccaagcgggaaacgggatttacgacttggtggatgatgtcatggtccttcacaagggtcttaccatctactacggacccaggatgtcagcaagaggatttttcgaaggcttaggtttcgagtatgtggatggggcgaatatcgccgacatgctcactggagttaccgtgccggccgaacgcaagatagctcctggttacgaacacagatttccccggactgccacagaaattaggaaggcatacctcgcacacggaatctatgaggagatgcgcaagcgacaagattatgcgcgctcggatgaagcggcgcagaacactcagcaatttattgaggccgtgaaactcgcgcgagatccgtcattgcccaagcactctgtgtacagcgttggctaccttcgacaaatccaggtgctggctcgccaacaatttaggcagattctgggtgataaactcctgttatacttccgccagggtaacaccgtgatccaggccctcgtcatgggatcgctcttcttccaagtcagcgatgacagcgtcggtctgttcacccggggcggtgccatcttcttttccaccgtataccacacgtgagcttaatttccggcgcaatattcttcacagcgctgatcgatgtttcatgtacagactcttcgcgctacaagaggtggaggtcagctttcaaggacgtgcagtgcttgctaagcagaaggctttcgcttttttccacccggtaaactacgtcattgcgcagctcatgggggatgttccagtcatcttcacccaggtgacgctgttcagtgttatcctttacttcatgacgggcctacttttggaacctggcgcctttttcacctaccttgccatcgtcttttcgaccacgatgtgcgcgacggctctgtaagttacagactgatgagtggcttctacacgacataactgacacaccttctcagcttccgtatgattggaacggctttctcgaacttcaccaacgcctccaaggccgggggtttgactatcatcatccttttcacgtacagtggatgtgagtctgtgcgaatgtacggtttgtaaaggacaccgttgacgcaatcttaccacttggtcagatatcatccacaagccttcaatgcatccctggttcgaatggatgttttggatcgaccctcttgcttacgcggtagaagccatgatggcaaccgaactctccgatcggactttcgcctgcggtggaacgaacctggtacctttcggtccggaatatgccggacagccggcgggatgctctggagtaccgggctcgataggagcatccgtagaaggaactgcctatctctcttaccttagcttttcaaagtcgcatgtgtggcgaaacttcggtgtcatttgggctttctgggcactattcgtgaccattagtgagctttgatctggcctgttctagacgaaaccaaaagcttataaatgatattcactccttcagctgctatcttgatgacatacactgtcggtggaggctcatcaggtgccaacctggagttcgctcggaatgaaaagaccttggcagcagtcactgctgtgaacaccaacgactcggagaagcagttggatttggaagacaccatgccatcgaaggaggagtcggtccagaccaacaagaacgccaaattcatcaagaacaccgccatctttacctgggagaatctgacttatactgtcaagactgcagaaggcgatcgtgtgctgctcaacaacgtaaacggcttcgtcaaacctggaaccctgggtgcactgatgggatcatccggagcgggaaaaacgactctgcttgacgtgctggcacaacgcaagactgaaggtgaaatcagcggcaaaattcacgtcgatggacgacccttgcctctcgcctttcagcgatccgctggatactgcgaacaattggacgtacacgagccgcttgctacggtcagagaggccttggagttctcggcaaggttgcgtcaatctcgagacactccgcacgcaaacaagatggcatacgttcagacggtcatcgacctgctcgaaatgcgcgacatcgaagacgcgctagtcgggaccgtcggcaatggcttgagtgtcgagcagcgcaaacggctgactattggagtggagctcgtggccaagccgtcgatcctgttattcctcgatgaacccacttctggcctggattcgcaatcagcatttgcaatcgtcaaattcctgaggaaattggcagatgtcggtcaagctagtgagttggctcgggcggaccaggcagctttcccattgctaatcataaccgcaacagttctcgtcactattcatcagcctagcgcttctctcttctacgaattcgataacctgctccttctcgctcgaggaggaaacacagtctacaacggccctatcggttcgcatgctgtcgatgtcaggcgatatttccaagaagcaggagcgccttgtccccctggacgcaacccggccgagcatatgatcgacgtggtctcaggtgaactttcccagaaacaggactggccgcagacctggctcaactctccccaggctgccgccattcaagaagaactccgatctctcgaaaatgacgctgcgagccgaccggtttcatacgacgagacggctgccgaattcgctgccacactatgggaacaatgtaaggtggttaacaagcgaaacagtatctctctctaccgagacacggattatgttacaaacaaggcggcgctccatatcctatctgcgcttttcaacggattcactttctggatgattggggacggcgccctcgacctgcagaacaaagtctttagcgtgttcagtttcgtctttgtgtacgtcgcaagtttggcgtccgcgacgaccgcgcgctgatccttgaatccatctacagcgcaccaggagtcattgcccaagttcaaccgctcttcatcgctcggagggatattttcgaagcgagggagaagaaggccaagatttacagctggaaggcgttcacattcgggctcatcgtcagcgaatttccttacctcctcctctgtgcggtcttatagtaagtgtcatccctcagtgttgagacaaattcgcgtgtactgatcggatttctcctgaccgcctcagctactgctgttggtacttcacctgtggattcccttcgactgcctcgagagcaggacccgtctttttggaggtgttgatgtacgagttcatctacacgggaatcggacagttcattgctagtaagtgaagtcacggacaagacccgatcggcaaagctgacgactggagcaatcccaggttacgctcccacggctacaatcgcatctgcctttacacccttgatattgggcacgcttctttctttcagcggagtatttgtgccttactctgccatgcaagacttctggaagtattggctctactatctcgacgtcttccgctacatcatcaactccatcttgtggtttgttctgtgggaccagcccgttgtctgccgcgcggacgaattgaccaatttcgacccgccacaaggtcaaacctgtcaatcctatctcaacacctaccttacgcaatataatcctggtgcaaacctgatcaatcccgaggcaacttctggatgtcaagtctgtccttacagttccggaaccaactacctggctacgatcaatatcaacgctgcgactacgggctggcgcgacatcgggatcactggtatctttgtgatttcaagctatgcgatcgtcttcctcatgatgaagctccgaacgaaagccaccaagaaagccgattagcttgccagcagataaagtcctatagaattcgtgaaaccccaataccctgtatcttgttatagactccaaattctgattcatatattgacgcggccacgaagggcattcatttaaccgacacaggaaagcggatatagaacttttcacaaaataccacatacacacacatacaattctagcatacagcatgggtcttgccggtcttggactgaaggctgttgttgtcgttgccactgctttcgtgtccatgacggtgcttgaccttgctcttcctgtgcttggcattcaattcacggtgtgaatcgatagattcctttgattgcttgtcgagtagctccagggtctgaacgagatcgcggaccactataaatgggaagatgtcagacgcatgctgctgttctacgactctgtggtcgcagcacttacaagcattgcagcgggaccgagagaaatccattctgcagacaactcggagcagacgcaagtcactggccttgggggccattctacagggaaaacatcagtcctgctacgccgacactatcggcggcaacactcacgtataagccggtacgatccagtttccacgacttcgcagagtcgaagcgacatcgtattcgttgaaatgatgctcgcccttcaacctaaaggcgacaaggggcaacgatttgccctgtcgagggttcatgattgtgaacctaatcgaagaatgctcagcattgaacatctgaaaacaaaaggtgatctacacctaccttcctgtagcttcgagctgggcggctaggtagtccgaggtctcagtgatggactgcatgatggctctaaagccggattttccgtttcgaatcagaactgaaggcattgaagtcaataacgcctctgtgagtctgcgccagatgagtcaggcataccatagtattctgtgagtgaaccaaatcgtcagtcgcaagctctataaccaattgtttgcctcgctgactcacggccgacgatctgcgcagcggatttcgaaaagttcaaggtgaacgaagcctacaagtatcatggcttggttaaacttggagtcatatgttgcgtcccgtgagcggacttacctggtcggctccgaggtagttcctgcggcccagcaaagtgggacgtcagcgaattgattcatggctagcgcaaaaggaccggaatccttacacgtggaagatcaagtcttcgggcaagtaatctttagatcgccaaagagcccaacccaccctgtgatacaaaacaagctcatgagaagggttcaagcaaccacacgaattgatgacagacttacccagcgtaggtcattccgtacttgtgaccgctagtgttgatcgatacgaccctgggaagcctgaagtcccaagccaaatcaggtacacagaagggagcgaccattcctcccgaagctaccagattcaaacaaggagcatcaaaaaccaagcttccagactgggcggcttttctgttacacttaccggcgtctacgtgaatcttgatgtctaggcccttttccttctcgagctggtccaacttgtcactgagagtcttgatatcctcgtattcgccttttggggaatatttccgtcgtcagtatgcagctttgacttgggttcttggcgattaacacttacccgtgtaggtcaaaccaaggataccacacataccgatggtgttctcgtcacaaaggtctacggcctgtcgcgagcagtacgtcagtcttcaagcttgcggaactcaagtcagacccggatggcttacctcttgaggatcgatgacgtatcggtcttctgtgcaatacacatacctctcctcgacttctaggtatcgggtggccttttcccaacctagacgaggtagccgtttagcgagattcgaaagagcgaatcgcgacggtttactcacagacttgaacagcggcgttcatgaccatgttgggcttgtcgtaaggtttccccgcggcctttcgagcgtgttgccattttcgcttcctgtaaacgggtacaaaattagcaatgcgtcatgtggcctcctacacgatttcaaggactgacatggcaagagtagcaaggatgatagcctcgctggatccgaccgtcgaggttccgacacaaccctcgccttcggtagtaggagcattgaacaatcgtccaatcatgttcactataaccgaagtatcggttaattgtgttccagttcaatttcctgatacttgagctcaccacatcggttctgaagatcgacggtcgcagggtattcctcataatcgatagcgttcttgttcatgttttcgagcataagcttttcggcggccgagtccatgtaggtggtgacgaaggaggccaagttgagagcaggagttccatcgagctgaattccagactatcagcatatgcagtcaggaaattctttcatcatgggaggataccaacctcgagctcgtcgtgaaccagttgataggcggtctcggaaggcatcggctcttcggccatctcaaactatgtcggagggacatacaatcgcgttcttttcagtatcttgcaagaaacagaacgttctggtctcactgtgtcaactcacctcaggaagttcccgagcggcagcggacgatccatagacgaggctgtctacataggcgatgggcttcttggtttcacccttgtgggcatcgctaacttcaccgaggaggaccatttttgcagtagtatcgaggctgaagtgtcaaggatgtacaatgagcggatctgtcgtgattgagaagaaaggcgacgaggtcgaaagaagatgaacaccgttgccgactatataggaaaatagacctggattacgatccccctatatatagctcggcttcaaacgtttgcgaggaaacgcgtcatcacattctttggaacgatccacctctcggccacatcgtaaacaaccgtcagcgtgagtatatgcacagcatttctccttttccccgtcaagattcacgccaacgtcagcgatagatcatgggaatagttatgagatatacgacatcactacaagcatcatgccttgtccgaaatgatggcgtgtgttacatcaggctacgttcgatcgagacgttagtgacaggggtctcaagccgagcttctcagggtgtccacacctaccttgctagcctcggtagatgcaatggcatccttttgctgcgcaataaacttgtcggcatccgctcccgaagcgggcttctcctttgccttttcagccttcttctcttgctatgatcgtggtcgatttcgagtcagttcgtgacgaccaggcctcaaacacgcccaccacgacactcatagctcaccttgctcttcttgacaaacttttgaggagccggaggaggagggtaagcggatcgttcagcatcctggaacgcctggtcctccgaaaacgtctttcggatgggctccaagaggtcgttgatcatctcggtcgtgatctttttcaagtcaccagggtgcaaagcgccagatgcaaactcgtcctccatctgctggaactgctggtaatgcacgggtcctccaaacttgtcgtcccgcacgatggtgaccaaagttccttcgggagcattgggggagatgaacagtttgttcctattctctgcgctcgcagggtcctcgccacgctcgacgagctgcgctattcgcatggtctgcaaggggaacaagacggccttgtggaaagacaagattccattatccgtaatattcttctcttcgcagaacgccgccttgatcttcttcttgacgtcggcagcactgtcgagaaagtcaatcttggagttgggatccgaagacgacattttcccgccagcgagaccggggaccatggggttcatcaagtgtgcacgcttggcgtaccccagccggggcagacagtcttgagccatggtgaagatttttcgctagaaagaaggcgcccagtgattagtcctgaagatgagctcaaactcgcaaatgtcacctacctgatccacgcctccgaactggaagtcgaccccgaggtactgctcatccagagcctgcataccagggtacagaagactgctcaggaagggagagtcggactgcttgacgacctcagcaccggccttggaggcgtcgtgaagggaagtaatagaggcgagcctgacatcatgcagtcttggtcaacattttcacttgtgctatgcggttgatgtgcggctcaccggaagttgtccagactgtactccttgctcagttggtagtcgcttccagtgataaagctcagcttgtcggtaggaacgccaagagaagtaaagacggcgtggaggagtttcgagtagtaggcgactcggaaagcaaccgtctcaaaggtagcctttccggcatcgaggaaggcgtggatctgggtccgacgatagaagccttgtgttagagaagctgtgcgatgggaacgtgaccataccagctcctcgaaggtagcatacttacatctggagcagataccgcgacccataaaagtcagtcagattaacgctacagtttcgttattaataacagcgcgggcttaccggcgagcagaatcttgacctatttcgaggtaagttttcgcaccgcctattagaaccctgctcgttcagaatccccccgaagtcagtgacccaccgaaacgccagcctttaagaaatcagcaatcttggtgaaaggcacaaagtatccgacgtgggctgtgttggcaagacactcgttgtcagcctaatgtcattacaacagaggacgagcttgaaaactcacgtcgaccggtagtagcggttcctgtgagatgatcagcgcatggaacatttagcacatctggacgataatcaaaccgatcagtttgaccaaccccagtagcaggagaccacctcgtctttggcgagcttgctcttgatgatatcctctcctagcacctcctgcaagtttcgagtgatcaagtcataggtctgctgttgagtctcactgagggtgatagtaggggcagcggcagctacgggagcaacaggtgcggacatgatgtagcaattttagcaagatttacgattatcacacagttggggtttgtccactggtcgagagcttcgaaggacattatcgcgttcgacccatttttacgagtataacgtttggggtttgttgaacatgtggatgtatgatcctgtgtattttctctgttgatgactcgattttcacacgtcatggggatatccagcaggaactttgtatcaattaaatacattccagtggcaaacagctgacgtcatactgtaacgtaagcaagaaactacccccgaacggtcctcctaacagacgatgtatattcaaaggcaggttgcagggtgatgtcgactaatctgtaagatataacttcggtacatctcaagccaatcctctcatcatacaaatcgcttcacttagcacactttattgtcgtctttcaaacagtcaaaaatgaacaacacgaacactactaccactactaccactagcggaggtaacatcggtgaaaagtccggcaatgccatcacgaatgcctttcatggtgagcccagagttgcacctcaggccgacgttcattttctgatttctccttggcttatcccttcgcagctgctaacggcctaggagaaggcattcgaggcaacatcaacgcctttgccgactctctcggggctgggatcaagaacgaccccaaggccaacgggacggctaacgctcaggacacggctgctcagcgacacaacgagggcgtggcagctcgaggcgccgatgagatgaggcagggtttggacgggctgaagagggcctaggcgagaggaggtctgcataggagccgcattaccgtcatgttgtaccttgtctagccgtgatcactataataccatctgatgctttccagcgggaccaaggtccagaaaacgaaaacatccgaggctcaggaggctcaggacgcaaagtattcatgttattcgacattgtatggaacatttacaagatactcttgctgaggacgttacaagccttgatgaagatgcggctgttcaggaaaatcccgacgagataaagcaggctcctcaagttggcggcttgaccgtccgtgatgaggatgtaggcaacgttgaaggcgaccctcgacaagaggtaagaagcggcactatatcggtcaagcgatgaggacctgcatgaagggcatatctgcggtgttgtcaggctcacaaggtgttcaaagtcgaagcaggaagcttggcgatgttcccggcgagctggcgggcggaacgttgcggttctgatcagtgagagtatcgatattgaggtctacgttggagtctcaccaaagcgacggctgtgtcagcaagatgaggttaagcttattagtttgatgtacaattcgggacaatgcctggtcggaaaagaagagggcttacagaagaacgcaaggttttcgaacccgttcgattgagctccttccgccctacggacacagcgtgattcagtcctataccacgaacgatatagaatgcatactcgctcacctcagaatcctatcaacgacctatttggaccggcagggcaggcataaccggtcagcaagggatgcgatcatttgactccgggtgacgatccgcttacgttcttagggatctgagcggtcttgaagtgatcgggcttgaactgttgacgaggagatgcgttgttccacttgggagtgcctttgctccggtacgaatcgaacaagccgctaacaaggaagatcgtcagtacggcccctgggaatcgtgcccgtctcgacacgggctcacacggccaggaagtgcgggctgatggagaccagccacatgacgggcactgcccatgggctgtagttggtcgaggcgaggagagacatttcgagtgtgtgatgtggtcgtgggtcgctgagcaagaatgatatatctggctgtctaatgccactgtaatcgactcaagttgtaaacttcgaccaggtcatctcgtatgcctaaaggctgttcaaaacggtcaacgcacacgggtcccagtcgctgcgcaagtcgcgagaggttctgaccaccttcggcgtctgctcgatcgtagatcgcgcctagccaaacgctgagagggagagatgatgatgatggaggcaaaagctagcatagtacagagatgtgcttcccaaagaggaagatataggagactagctagctacgcgtacgcgtcgacaacgcgtcattcaatcgccgcttcatgaaaacccccgaggtgcccgaatctcgtgcgtcctctttcgattagaccctgcttgagtacctgacaacaaccgaaaatcgcgcatatatgttgtattcggtaatagctacagtgttcgaaaagacgcgaagaaaggattgatacaggtcaagaaaagtattatatgtatatggtatggtgttttgtagagtcgagagaattgttcctgcaggtggtggcaatgcaaacgcatctttcctctgatgagatatagatgaccgcctaagcgtattgcctgacgagaccggcatcacttccgtaggtagtgctgggcctggcgctcctgtcatagctctccctgtacccaccctcaaagttgtaaggcgtggccgacaagggcaagggcgcggcgtcggtaggaggaggaccagcgggagcggggtaagcattgatacctgcgttctcgggcaaagcctggccgtcggctccttgccatcgttcagggtaagtggcaaaagcgtttcggccggtaaagtcgtgctcaaggttgtgaggctcgttgtgttcctgccatcgggcaagacgacggaggtatcgaggagaggtctttccggcgggccagactatgtagcggaaagggcgtcaatggaactcgcttcgtgatctcggtcgccagcactcacggtcaaggaccaaactcaagatgtaaaaggtcaaccagaaggcgactctgcatgccggaaggatctgtcgtcagattttcaatctctaacggatcgacttcaagcttaagactcacccccattcaacaccggcagcagcactggtgattcggtcacatcgagcagtgaaagcgtcacccttgcaagtaccgtaaagagcggcaaaagtgatggctgcgattttccaggagaacagggacgatgtcagcccgtgaatgtcctcatcccggcatgaagagccaaaactcaccggcaaggatggcggtggtgacgacgaacaacttgacgaaagcgctccttcgcaagtgttgcttatccgggtggtcctttttcaaggcgaactacgatcgtgattgacaagtcagttggctgtctactacgcgtcgtgaaaaaaggaaacgagcgatacgtacgatctcagcagactggaaagcggcagagatggcgactccgacgatgaaaacgacggtcatggaccaatgaacggtagagtggttgaaagtgtcaaactgatggatttcgatgcgaacatcattccatcagaatcgcgtcctgacggtcctgcttcccggatgtctaacgcgagactcaccacaccgagcaggatcagagcgatccctccgatggtaccaaagaagatggcgagccagtcatacaccttttccctcttcctgacatcttcgggcagacggtccatgtgacgcaaccacctttctgcccagagagaggcgatgtagaagacggcggtgatgacggtgatgcagatgaacaaggtgtgattggcggctgaggaacggggaagaaaactgcatgtattagtctctggggtttgcgggatcgagttgatgtgaccacaggggttgctcacctccaactgagtggggatgaaaagaacggtgacgtctcgcgtaagcaaatcgaaataccggtacatgcgtcctttgaagactcaccatcagaaacgaaaacgactgtcgcctcgtctcccctgtacctgggtttgccctgactcgtccagagtccgatcatggctaatagacctccaagccatacgagggaggagatgatgggcaaaaggacataaggtccaaagatgaagtgcgagagtatgttcctctggttcaagtaggctggcttctccttgctgtcagcgaggacggcctgtcgcttttccttgttgaacaagaggttggccttcttgttcttgagcttttcgtcgaccattgtggtaagaacgggtagaaagttttggtcgatatcacgaaacggggtgtcgcgcgagctcgagatcgacgatcgctaaaagtgcgagcggtcgagatgaagaaggtccggggggtcacactcaggtatataacgtgaactgcggataggcgtgtttgggtagtgacggttacgggacaaagtcttggctcctcgtgctgacggtctttatccctcttgacgtttgggtcaccacattccgcccacagctttggaagctcgagggatacgaaggtccggaggatctggagtagaaaaaaccactctacggaagattgtgatgacgcgcgaaaagtgggcaggaggggagcgcgatcgcggaatcaacctccacttgcggtcattgccccgcggcaaacttcctaccatcctctgcttcgcccttcccacgtgagccgagtcgatgacgtcgtgcgagccggcttcgatcgtcatctccgacgaccgaatctatttcgtgcgaaacgatcacacatccccgccatgtacgcggtcatccgatcgagaacgacgtgatcgaggaccggggcccttgatctcgcgacccatagttgctgacagctgacaaacggaacaatgcagcatgacgtgtctcagatccgccacagtttcgaccgggttcgttagctgtgtttgcgtttgaaacatgctgtaccggggttcaggcgcaatggtacttggacagctcgtagttttgcatgaaacgtttcggcttcgcacgatacgcatgcgatgatttcgagtctctacctcgatgaggtggttggaacaggtgccctgggcgataagatgggccaactttcagctgggactgaagatctgaggtgattgctttgaagcggtgttgtcttgtaacggcagacgaaatgtcatcggtcttgaaacgcaattaccaacgactaacgtatcaaagagtgtacgagcctctcgcattgggaggattcgtcggaaacgcagtttcgatttcaagggtttccctgatgttggcgggaatggctgatacaatgatcctccaggtgatttgtcagtgtctaacggccgaaagaacgggcctatacactacccctggtgacttgatatcaaccgcttggaattcgatagagaactagcctacttgtggttcgatatcgggcagtcgagccgccgcaacgtgccccgccaacgtcacgcaagacaaagctacaaggccccgtcaatcatgtcggcgagagttttatgtcatatgagcgataaggcggcagatcctttcaagcctcgcattgtgagctgtcttatcgagaccggatcatgatggactgtgaaagttgggcatggttaggatctcctttccatgacacaatgcgccgacagaccctatataaattcgacctacccaccatgactcactttctcatatgatatatcgatggaacgacgacgtggcactcacgacaaccggcctcatgcaggtcgctgggccctaagatttggtcgtctcacaggcgaatgggtcccagccgtcgacaccgcgtgccgtgaccgcttgtcagggttgaggtcgtctgctgaaacagggtagcaatatgcgttatttcgtcatctctcgtcaggcaattttacgcgttttcgaaaatcgttggtggccgaggtagtcacaagttgcaggtcatgaatcacgcagctcacatacagaaaacctgcacgatgtaagccataagatctaccacaaatcgttccagcgatagtcaataagcctgatactgctctccaggcacatacctcagtcgaatccacagccatgccatccgtatttacgagacgcgctcccagcaccaacactcctctaccggcaggcaccgcaccttcaccttcagcgagcgctttgcccatcctttctactggtataccttcgctcgacgatgtcctcggctcgggtcaaccgctcaatagtgttctcagcatcctcgcacccgatgttcagtcggcatggggcaaattggtcgcccggtactatatcgctcaaggattggccttgggccaagacgtcatggtcgttggaggcagtgacgaggaagatctggaagagctcgtcaagggatgcatgtggatagaggagagcgcgaaacgggtcgcggtcatgtatgccaatgctaaagaccccgcaactggagacggagacgacagcgatgccgaaggtcttgccgacgacctcgactcgggaaatcggacgagaatcgcttggaggtacgacaatatgaaaaagtttgagacatccgtttcatctcgagccggacctagctgtcagtacagaaatagggtttgctttaccgtgtagtcgctcacaaactgaaatctccttacttgcgacgaacgctagcaacgttccatctacccctgaacctgatgacaccaattccccgcaacaccctctcgagcgtccgagcgtctggccaactcgaacttctaccgctcgataaactatcctcttcttcctcgacatatcagcccttccgggacgttctgagcagactaaagagcaagctgtatactaacggtcaagcacgaaaaaaagtactccgcgtcgtcatctacgagctgggcggccctgattggggtgatgctgcatcatccactgtgggagtcacttctcttgttccgcttgccgcagtgtttctcatcgatttcaatttcccatagtcgattcaccggtttctgcattcccttcggcatctccttcgcattacaccggatcgagcgtcgacggtagcgccggcatcagctctaatcacctacccagcccaactttcttcacatgcccctacggatagcaaaggcaaaggcagggcaacaggcggactcagcatgacggacgatgcctggctaaagagccttgcggctgtcagcgacgcttgtgtcgaactacaaggattcgcatgtgagtagcgcatccgctcctcatttgacgtcagacgatcgctgatccgtacgttcaacgtgcagcggatccggctctggtacattccttccctcactctcatggactggttcacgttcgatcgttcccgacattgcaaaccttgctgccgccgtcttacaagcactcgacccttctcggcctaggtgcaggtagcacgggacagaacaatctcagcttccgcttaaagcgcaagagatttgtggtcgagactctccaccttggcgtcgagggaggcgtgggcgagcgcaggactgagcctcccgcgacgatgaaaagtatgagtacagcggctggaaatccctcatctcatgtacatggatcaggctgttcgcacggcagcgacattgaaggtgttgtgggaggggtcgagaaggcagcggccgcttcgcacaagccggatgataccacggaaaagcctcgagcgaggttcgcagcaatggacatctcccttgaagccgagaacccctcgttgacgccagtcccgaatgagattgacaattcgccggtcaatccaaagaaagagcgaaggaaagtggctttcatgcagcatgaccagcccgagttgtatgacttttagtggaatgacgattcatcatcaattcgcatccggctcggatgcttatgatggcagatcccgatcttcaatcgagagctgtccaagatcacgaatcgccttcaaatctaatctttcggttcatataccttattgattatctgttctcgtttgcccagtctctcctagtgaaggaaattacacctgtaatataacagactgggcgcaatgcgtttctccgcctcagcatcgctcaccactatcggactgtattgcctttcggctgtggccggattacctcaaccgctcgtcgatgcagatcatccacttgctaattgccccgttctgtctaccaagccgatagctgagaaagctcgcgatgtgtaagaaattgctggacataaccgttgacattgctgtactcataatgttctacgatgacatgtagccgtccagatgagatctcggtcgtaatggctattggcgatagcatcaccgccggcctgttcgcaagaccagctagcgacgatatgtctcggtcgcaaagcctaagggacacggatcaacacttctttccgggggtcaaagggtttcaggagtatcggggcgttagcttttccactgggggtgatgtggatgctgtcacgctggcaaatgtgagtctcgatagctcgatctagtttcgaccgactgctgatcccggtcgactgctggctgaacaagaatattcggcactataatactcaactcaaagggcagagctacggacatcatcgacccgggatattcagctctgagcagtcaaagggtacttatactctattagtttagatccacgttcgaggctgattgacgggtcttttcagtcctggatcacacgccagctcatgacggcctgaatgctgcaaagtctggcgcaaaggctaaagacttgattggtcaagttgagagtaagcttccgcggattcatacgtaaatttgggaaaaatcaactgaagttatcaagcagactaccttatacctagtctgagtgaagtcggcgtcatgcgggacgaatggaaattgatgacactcagtatcggcgccaacgacgttgtaagtccatcgaatcgttggatcgtaggcttcctcaacactgaaggtgttcccgacctttcagtgcgattattgtttggctggcaatcctactctaggtggtcccgggagccctcaacagttcgcagataatgtcaaggaggccatcgtgactgccagggacaatatccgttggtcgaacaggagtcatcacagaccgacgtcgtgcttataatcgctattctattctcagccaacctcgttgtggatttaggcaagtcgagcatggcttgcgaatgatgcagccagtatgatcgctaatatcggacaacacgtcatccagttggtctgtttcaggtttctgctatctacaacttgtcgaggcagtcaccttcgtgtactccactccgattaccgcccatctttcctaccctacccgtggagtgtcaatgcgcttgggctcctggacctctaggtgatgcttccagaaagaaaatggatgcattgggagaggattataaccaagcgctccaggaaatggtggctcagctgaacgctgagagtaaagaggacttcataatcatctggtaaagtgcattccggccaacctgggggtacatgactgataagcatgtggatctgtgctaggcaacccggaacattcttgtccctcgccgatttcccgacgatagcattatcgccaatcgactgctttcacccttcccgcgaggctcatcgtcgcatcggagccggactgtggaatcggctcacctcacctcaaggcgcaaaggccctaccgatgacatgggatgaagttgagaaggtccggtgtctccaggacgacgatagaattcgaaactagcggcggggctagcatgtctcggcacaacgtcgtcgtcatcgtcattttcaaggctttggcactcacgcttactgggccgaatgggacatgcgggtctcccctttgaagaatcggattatagccccactctcacggcgctagctcgaacagttgtacttcattctgtgatctgtagcctagtacgaagactgtaaaccgtgtatcatcttttctaattttttgagcgaatcgtatggcaccgttttctgacgtcacttttttcgaaatcagcatatcgggactcgcgagattgggagcttcggaccgagacttggccgtgaaatctgcacatttgtgtctacttgctccatacaatccttttgcttgccattgaacatctcgactacggtcggataccacctggctgtcatattcttcctcataatagtagagacacagcagtgtcctcataatcgaaagcaattccgtcggccggattccctcgagatacctttgaagggcttcccctctgacgattaatcacgggacttggcagagctccatccgtcagtagtagtggcataacacctctacttcgaggacgacggaaccaggagtcggtagatcgtgttgcgtttgagccggtctataaaccgattcgatccactcaaaatacgacaagactgctgcgaagacggtatcaaaccagcaggggctgtgcgcacgaaccaccatgcgcaaccctttcacctctggcaagaagacctcgaagtccaatgatgccttgcctatgactaacacggcagatcttaatcacctagaatacgctcgaccgatacccaattcgaccagctacgattcctcgctggatgcagcttctcacctcgcttcacccgatagcaagaacatgtacgctgtgtcgggtcaccaagcccacctcgagcctgctgtctcacgactgccatcaagaagactttcaagggaaactcacgaccgcctacaggatgtagtcaatgacgagcccgacgctctgggccccgacgagtcgaacctagatgagaaacctgaggagaccaacctcttcaagatgatgattgccgatttctgggctctgctcagggtattcaagacgatgagttggaaggagtttttccgtaccatgacgaaaaggtacctctggagtaagtctgtctctttccgagagattgggggaagaccgcttatcctcaggacggcaatgtgcagaatggtatgtccttcttgttgtcgtcgtggttgtgacggtattgctgtcttcgaatcacgacactatcgtcgagttcatgcgacccgcgggacacaagatcagaagctggccaggcggctgggtgcgtatttctatcggggttgataggccgagcagtcgtctgacatggttaactttccgctcttcagctaatcccgatcgtcgtactcgtgagtttgcgctgagtaacggaaggaatattgcggagcactaagcttttgtatattactgcagataattttgtcctttcctcctcttgtcggtgagtgagctcgcgttatttcggccagacgacgaggatcttatcagcctttgcgaatctagggcacgaggttatcgggatcctcatcggcgtgctttggggattgaacattggtttctggattttggctgccggtaccttcctgggagaactggcaacctggttcgttttccgcacattgtgcacctccagggcggacaagtgagtcccgttcaattttagagtcgcatcacgtagcactcgactgatacctcatgacgcgcagattcgagaagaagaacaagttttatgcggccctgacccaactcatcagggagaaaagcttcctattcgtcctggttctacgtttcagtgctattccgggccacgtgacgacggcattgtccagttctgctggagccaatttctggagctactgtgcggctgccattctaaccttgccgtgagtagtggcatgccttgctacagacgacccgaaggctaaataccgggaaaatctcgtggtgcccttccagcaagcagctgagcttggtctacgttggcacggccttcaactcagataacagcaccacgcacgctgtctcggttgcgaccttgatgctgaccatcgtcggaacaggggttgctgcagtttacatctactatcagatgcgtatctacctgctcagaaaggaaaggtacgaccgagctcaacagctcgagctgaacggtgacgccggggatccagagatggccatggtagacaacgggggtcgacccgccatcggtggacgtagatctcttgacggtcgagacgacgcagatcatactcgttacaccgatgagccttgccctacatcagcctatcgaagagtacaggagaccaaggcaactcgacgtccctttttacactcaaattcgtccttcggagtcttcgctggtgctagcaccccctctcggtcgaagtctttgcacgagcaagatggcagttccgtttcggagtacttgaaaacgaaacgactggactttgcgaacgaaggtagccgcattggcaccgagacacctcggtttgtggtgtcgtcagcagacgagccatatgcaggctctgggaggacttgggaaagcgccggcgatgaccgaacaggcacgcatttgaaccctttccagcactcgatccaaaccaggcctaggtcggatacgaatgcctcgacggcatccgagcgattgctacagcaatacaacgagattgtcgaggcggccgacgtggtcagagggaccgcttccctcgacctgtggaggcctgctgacatgagcctgcatcgtcacgggcgtcagtctcaagatggagaaggaacgaggtcgaggagtccgccagtgtccggacgagagattgccaaggatgccgaccactttgcggcattgcgaggagcgcctcgaccagaccttggacgatcgcgaggagagtcgagtgcagctcttttggggcgaccgcagctcgacgactaggaatgttgcatataccgcaggctctagcatagtagaaggtaccatgctgttcgaaactcccacaggaagaaaagctttgtattcgattctagtcttgccccgtgaactgtatcgctatacaccctgatgtccgttcatcagcgttagccaatccagagtcggccgaaatcaccggaccgacccttgccggaatcaaatatagccggctgacaccccgtctgctccaacgccgtgtcaacctcgatatcgacctccgttccgaacgatctgtatatctcactccgacctgctcacgatgctgccattatgtaagtctgagtaatgcagcaagggttccgaagcatctcacctatcgtcagaattgccgcacgcacagcaaaaccttcacatcgcgccctctcgctcactcgccactttagcaacacaacaccgataatgagctcttctcagtggaaacaggtcagttgcgaatctcgatttagtattccttgcgtggagccagtactaaaaacgatccactcaatattatacggttttggtcgcaggatgaccacaagtgagtgtcgtgtctggggtttcagatagtctcaagctttggactgacatgggcttactccggcggtttctaggcttttggtgtacgttctgacctagctacaacttggtatgtgttcgtcaataactggtcatctttgaacagcatcccaggccctatcgaagtcgcagatgatgtgagctacagatagacggacgtcgcgtgtttagctgttgttcaccgatgatgcttcctaacccaggtcttgcttgccaatgcccatcgtgagttgccctgatatgattcaacgctccgaataggcgctcatttcctcgctcttgacaactcgcagctgcaatgtcccacgtctcgccagccttcgctcccgtcttcggcaactgtatcaagctgcttcgaaaggtcctttataccgagtcaggccaaccattcttggtagccggttcgggtaccttgggctgggatgctgtagctgccaaccttatcgagaagggagagaaggccgtgggtaaaaatctattcaagcactccgatcggcaggactgacgaacgaatctttctgcagttggtcttgaacacgggttacttcggtgaagccttcgccgactgtctttccctgtacggcgccgaggtcactcaacttggtgctcctctcggaggtgctcccacgttagtactttccgtttcaatggatcagtcaatttgtcactgagaaacgcatccatacagcaaggagcagatcaccgaggccttgaagaaggacaagtacaaggtcctgactttcacccacggtaggtttcactggcacaacgcggcaagactaaaataccaggcgctgaccttgtgaccgatcatttgaagtggatacctccaccggtgtgctctctaacgccaagatgatcgccgagaccgtcaaggaagtctcgcctgagaccctggtaagtaatgtcacactcaacttggcctttctaatgatactgatctcattccctcgtcactcaggtggtcctcgacggcgtctgtgccgttgcttccgaggagattcagttcgacgcttggggtattgacgtcgtcatctcagctactcagaagtatggcaaccgttcctctgtggtcaccaacatcgctggacaatgctgaccagacctccattcgcaggggtctcggcgtccctcccggtctgagcgtggtggttgcgagtcaaaaggctttgaaggtcttcgagcagcgcaagtcgtccccggcatcgtactacatcagctgggccaagtggtaagttacgagtgttagcggcctactcgagatccgccgaatcactcggctcacacttccgtgcaccttcgcaggctacctgtaatgaagaactacgaagctggcactccttcgtactttgccactcgtgagtagatgcaaccacctgaagtaatagaccgtggctgacatgaccatgctatacagcccctgtccaactcatctatgctttggaaacttcgctcaagaccattatggaaggcaaagtttcactggaagaacgatttaaaatgcatcgcgaaactagcgtcaggttcaagaccgccatgaaggacatgggcttcaagctggcgagtcgaccctgcgaatggttcaccagattcctttgttgacatgcagcgtgctagcagcttcccttgtccgatgacacttctgccaatgggatgagtgcggtctacttccctgacgggttcagagcgcctgatatcttgcccaagatgcttcagtgagtgactagcacatgtcatgaagacggcaatcagcagctgaccccttatcgacccagacgtgacatcgtcgtcgccgcggggcttcacaaggacgtcaaggaccgatacttccgcggtaagttgcgctcgcaagtgttctcgctgtgtgtatccgtgctgactcgactccctgatcgactcgcccggacatagtcggccacatgggcgtgaccgttgtcaacccggaacgaggggacatggacaagatcatcaagggtatccaagattcattcgccgaagccgggtacaaggttccttccaagtcggcttgaagccagaggaggggcgccggcgacggctcttctcagttccaggcgaagttgtaaacaaacgtcgagcacagaaaaccatgaccatgatgtgatgtcgcattatgcggatggcttggaggtaacgaggacaggtgccgaatgcccatacgatccagagtgcccgatgtgaccgacttgctaaccgaaggtcgagcgtaaactgaagaatgcaaatcatcgcaagctcataaggttgagggatcgctcggcctcgccatcaatcaaatgtctcattcacaaacgttggaatccggacagccatctcgggtgaaggggggttggattcgatccaccgtaagcttgaaaccttcaccgaggtctcgcttaaaaactcaaagtgatcggcggcggtctggcggcccgcgagcggccgctgtgtctctgtgtcgttccgcaccaacgcgcgcgaggcaggatcgcgctcgggctcaatccacaagctgccgggccgggcacgattaatgtccgacccgcttttttcccggacttggacttatgaccgacaaaggaaaacagccgcctcgacgtcccgaagtccgtcttctcgtctcaagcgtagttaacgtccaagcacaatctgtgctagtacttgaatatatgaaaggcgcaaactcgaggcagtcactctggccagccgtcagcccaagctccgtgccgcacccctcggaagcaatttaagcctttcctttcctgactacggggccggggcggcctggcgaggggatcgttcgcaaaacgcatgatcgcgccgcgctggaatccgttgccgtcagcctttgttctagcacacgatccactttgtgccgcttcccccttcgccatctctgatgatccgcgggacgtgaaaataggtcgaggactggaatcgaatgcagatcgtgatttcatgatgcatgacggtgaaaatgatacgctatcgtcagtcgtccagcgtcccgtcagcatcaatagttatggttgtgtgaagcgtctccgggttctatcgtgatgaagcacgacgcactgtcgccgagctaacagtacttcgggcatggtactagcaagcacagtgtgcctgctgccacgctccatccgggaagaacatccctgctcgcgcacgggcacggcctgtttcttacagccactcatacgttcacaagccccactgtcacagaactcgccttgaatcatcatcggcctgaatcgccgcggcacttgaaaacgttattgtgtcaggctctcgctgacataagatgcatttcttccctcgaatctctccgaaaggggcaggaggggggcgctcgacccacggtatcgggtccggttaggacgaaggggattccagcgaatagggacgcggtactggaatctcttcccaccgaattccagcccttcctcctgcctcttgcccccccgccccctaacccctaacccctaagaaagattcaagagcacttgcccgaaatcaattttgcctgtgttctcgatttgagctcgttctcgtctcgtcaggtgagtcgttgctatgaaagcgaagccgtactttggcggcgtgctcactgatgtactcgctatcatttcgttctcttcagatccattcggttggagtagaccgcttcgtttatgaatgtgaacgaccatcggatctcgatgtgatcgcgtcctacgatcgtcccggtcaatacgacatctctttgcttgtacagccggcgatcattccaccgctgtgcacgttacttcaaaacgagaatcgtcaggagcgaccgccctatgtccgatcacaaggcgccacatctggtctagaggcgatgttgccatccgacacccatacccatctcgtcttgccaatgttctccggcgagaccgtgttgttcgcactcttggcgaccagctcggatacggattattcgtttgatcgaggcgactctgtctttatacgcagtatcgccaccgtgctcaaggccgtggccgtccaagcccgtgcgatcgaagtcgaacagaaacggacgacggtcatgtctcgattaagtcatgatttgcggacacccatgcacgggatcttgagctcaatcgacctactcaaaacgtcggtcgagaacgatcaaggaagggaggctgccgaactgctcagcactctggatgcgacgtcgcgacagatggaaaagctcatgaacgacattctcgacgaagagtctgacaatagactggattcaagtcgccgtgcggacgtgagcgcttgggcacacattcagtctcaatcgcaagccgccgtcatgacgcccggatccatggattcgcatcgttcgatgttcaattttggacaagagccgagcgatctattgccaatgtcgcccgtgtcgctcgccactctcggcgagtcagtttcgcctctgaactcccagaaactcggagaaccccatccagactcgatccctccgatcaaatcgccgacatcatcgagatcgcccaactcgcccttctcggtttggatcattgaagacaacgagatcagcctcaaactcctggccatggccgtcaagagagccgctcaggggtgtcgagtgaaacttgctcacgatggcgtccagggcttgacggcattttcgacatctcagcccgacctcgttctcactgacatcaacatgcccgcaatggacggcatcgcggcttccaaggcgatgagggccgtcgaatcggctcaaggctggcggcgatgtcctatctttgccgtgacagggctaggtcgggcagatgtcgagaagcgccgcgatgccatgaacgcgaccctggacggatggttcgtcaagggacagcatcggatggaggacatacaatcgattgttctcaaagtcagagcacgttgtctggagcggcaggcggccgagacactgcagagcgaagtgatgcgcagattttctcagtaacgacccgctgcggctcataacacgtcgcagtacatgtaattagttgtattcttgcttttattcccgggtttttgggtccatggagaacagtgtactcgttgtaaggttgtacggaataataaatgttatcattcgagatttgattcgcggcggtctcgtcaccggaaagcttttgctgctgagcctgctcgatcccgatatggtgatcccctgccacctgcctagacatagtactgaagagtgcgccatacgatgctcgtcgacatggtcgtgtggcagacagtccgatacagggatcgctcggcgttcacgcttcatccctggctttgcctggaagactcacaaacgtttggacatcaaagccccctcatcccggcgtgacggtctggtcaccgtccgagatccggacgatgatcaaacctgatcccgtgctacctagttttcgctcgcctctcagctagccctagtgaccaaaacattacggctcgcctctgatgatatctttggcatctctggagcactttcgaggccagccaaaaatcgttgggctcctcgagtcatcgtccggaacaccacactcggatctccacttcgtaccaacgccgattcgacggtcttgcgggtggtcccttgccatgccagatcgtcagggttcgacccctacccgattgtctgggctttcaatactctgatcatagtccggatcgcaaagaggtcctgcagcctgctggaacaaaaaacgggactcctctctgacgacttggatataaggacgagtggagaagatgtggggaaccaggtcgatatggggacccgtctggagtcagatcagacccgttcgacctacaaggcaagactgtttcacaatgacgatctctgtccccgcacccaataccactattccctcgaccggcgctccgggtatcacttatcaccctcgatctcactcacccagcggcatcgcgttcaatcaggacgatgatatgaccaaggagaagcccgagatctacctggacgagcatgccgtcggtttcgagggcgaggatgccgaccccaattctcccgccgcgatcctcaagaggtacccgctgctttgtgacatgactggcgaacagctggagcgactcaacaagcagacacgcaggacaatgtgagtcgcgacacctcaatcgagagctgacgcaggacttagagactcagttttcgttctccttgcttgacaacagtgacatctggatgttgcccatgttgaccctgatgttgttcagtgagtcatatcttcatctccgcgtctgggaaacgcgctgacgactggcttccatagtcaattacctcgatcgttcgaacggtcagtctcggccgtcctcttctcgcccacagctgtgggcctgccactcatcaagttaccatacttcttcgcctctacagtcaccaatgctcgagtcgctggtatgcaaaaagacttgaacatgagcgatgtcgagtggtctgccggaatctcgttgttctatggcaagtccgctctgttatgtttggactgatccttcgaagctcatgctcgcgatcctgtcgcgcacctgatagtcggctacattatcactcagctgcccggatcattgatcttgtccaagttcaagcccagaatcatcatgcccgccatgatgtgagtcggctttcggactcaaaccgcgtgctccatcgctcgcatcctcacccttcttttctcgctcaggattctctggagtatccccaccatctgcatgcccttgtgtaccaacggcgccggtttcatggtcattcggttcctcgttggattctttgaaggtcctttcttgtgagcgcggtccgcatcgtccacgatcggccaaagctcatcgcacttgcctcgcagccccggtgtcgccttgatgacctcgtcttggtatggtgagtgacgcttatcattcgagttcttacattcgggccgtccgctaatcgactcggcgctacagtcaaggacgaacttcccttccgaatggccgtttggcacggagcccaaaccttgtccaacgtctttggagggccgttggccgctggaattctgaccacgatggacggtctcggtggtctgcacgcctggaagtggtgtaagtactcgatacgccaccctcgatgggtaatcataagttttcgacctgaccgtccctggttcagtccttttgatcgaaggtgccgtctctattctcgttggtgtgctcggatacttctgtctgcccaattggggtgagtctctcgaggcagccccctctctgacactgcatgtgccgtgtagatactgataaccgccccgcgtctagccgacaacacgagctggctcaccgatgaacaaagcgagatggctcaataccgacttgtcctctcggccggtggtatggacgagactaaatccaaggtcaccatctgggagggtgcacgtctcgcactcaaggaccccttcacctacctgttcatgtgcatgcacttcatgcttattgttgctgtatgttaagcgactggtacttggtagactcggcactgacgcactcctccacagcaatcgttcaaggatttccttcctaccatcatttcgaccttgggcaagggcaagctcctcacttacctggtacgttctcgtcgtcgagtgattatctatcttgcgaaatcttgggctgacctggatgcatgcacagttacaatcacccgcctacctcttgggatactttgtgagttcaatgggacgtttgacctataatgtagccgctaatccttggtggctcgtaggctattctcggtttcggttggtctgccggtcactttaaggacgccacttggcatattgtaagtcacacctcatgcgattgtgttcgtggctcgaccactaaccgtagaggaaccaatgtcgcaggtcgcccctatgatcggcagtgcggttggaaccgccatgttgatcgctaccgagaatgttggagtccgatacacaggtatctgcctgctcatcatggtaagtacctttgccacagacagtgaccatcaataaggcagactcacacccatcttcgtactgcagggagtctattctggtctcaacattcaggtgtcgtgggagaccagtgttattccttcgccccgtcacaagaaaggtgagtcggaagaacgcgagatccggacacccaggtactgacgccgtctctcttgcgttagccgccgtcatcgcgcttgccaactccagtacgtttgattcgcattcggtttggatcctctccatcgtcgctcatgctcgacctctgccctgatagtcgccagcgccagtcattggtttaccccttacttgtgagcggctttccgataccaacggttctgcaacatcacgttgatcacttgatacatacacagcttcttgcgaaaccaagaacctctctaccgactcggaggtggtctcatcttgttcggatgtggagctacgatcgcaaccgtctttgtcactcgttggcgatgcaacaagctcaatcgcggtcttgatgccaaggagctcgaggaaaacacccgtcgagaggcttcgggtcaggagcctctggagaagggctggcgtttccctacctaaaccgtgggaaggacaagaatcgagcggtaggacataaatacaccaatcgtcagatgatacctcgatcactggaggagttgtacatgttgtgctgctagggaaagactcgaaatcaaaaactgtaatatggtcacaatgtcggtatttgtatgtccactttgttaagaccgacaccatgtcatccgccgatacctaaagatttccgccaccatggcatgtggtcccagacccagctgtcccactcgcaacgtatttgtgatattcaaagcaacccgcctggctctacgatcgatccgcacagaaactcgacaagcttgccattctagtcccttttaaaatatcgaacgaaacggtagactcgaactcacccttgagcgcgccttcccccctgctactgactatttcgcacggcttttcgaaatctcaagcgcgaccactcccgctcgtctcacgtgacgaaaaatccctcggacgatcatggaactcatcgatccgcaccgatatcgaaatagacgctactgattggcttcagacggggttcatcgatcacgatgcggcgagaggagctggatccgtctctgccaagacttttggcaattggcttgaccgtgtggtttttcaggacgctcatggtccgacgagtcgatccgaattcatcgtgcgtccgaacgttagtgccgtttcacgtcttactccgatgaccggtgttcggacgatcaatttgaactgaacgggcattgtctagaccgcctgttcaagatactcgatcatttattagggacaagtccggcaagtccagctcacgcctcacaaacccatcaaccgagatgaaagacctcaacgctctacccaatcaaaccaagcgtcgacatgccatccgccaacgtagaaactctggtacaaaccgcacctccggtcgtgaagaccgccaatggaaaccacctcgtccatcagcaattccgctcgaggccgtttcgaaagaccctcaatgccgtcgtcatgcgagccggtacctccaaaggcctgtttctgcgtctcgaggatttgcccacgcaaagggaagattggacgccgatcattctcgccgcaatgggatctcctgacccatatatgaaacagctcgacgggatgggaggtggtgtcagcacccagtcgaaagtcgcagtcgtctctcgatccacggaccccaatgcggatgtcgattacctctttatccagggtgagcccggatacggtaccgaatcgctgcgcgtgagctgggctgaaacaacgatgatcagtgccggtcgacaagctcgttctcgatttcaccggaaactgcggcaacatttccaccggagtgggccctttcgctgtcgagtaagtgaatagaaaaagaggactcgtctaatgtgtgcgcttatcaacggtcaatgcttgacagagagaacctgttcgatgtcgacagccctgaccggcacgacgtcaccgttcggatccgcaagtaagtcgtcctgatcgttcgatcccagcctcggcgcttacatggcaatccgtagcgtcaatactggagtcatcatccacagtacctttactgttcacaacggatatcccgttgagtatggcggcactcagctcgacggtatctcggctatcggaagccctgtcaaactcgacttcaagtcacccggcggcgcgatgaccggacgggtcttgccgaccggatcacctatcgatgtggtgcaggtgggaggagcaacttttcgagtctcgtgtgtcgactgcgccaatccgttcatctttgtaagggcggaagagctcggtcttgatgggacggagaccggtcaggacctcgtgcacgtcaccgacaccctcatggagattcgagcgcgaatgtcgatcgccatgggtctgaccaagtcgctcgacgaagcgaggtctcgtatgggaacccccaagatcgccattatcaccacgcccaaatcgtacaacacttcgtccggacgacatgtcgacgggtcctcgattcatatcactgcgaggccatattcgatgggggcccctcatcccaccctgccgatgacgggggccatctgtctagccgctgcctgtactctatcgggtaccatttgcaaccaggcagctcgtccccgttcgaattcctcggagccgtacgtcatcggtcacggcggcggaacgatcgcgaccgcatgtgttgtcgatcacgatgcgacgaccggcgcgcccatcattgagagcggcagcgttattaggacagcccgacgcctcatgcaagggcaggtattgtacctcaaagagtagttgctgcgagggtcattttgtatcattttcgaatcaaagttgtacatacagtccagccagatgaaccggattcgactgtcgcatccgattttcataggctaaagaacccgtacaggttgtctggttgctctacactccaaggttgattttcagacgttccgtagtccatcggcatcgggtctgccagtaaagcctcgaacccgaaagatctgatcatgatgcccatgccgccagttagagtgggtgagcgttgtggcaatctgttagtcatacgatgatagactcgcctgatcacggcacttatatccacgtcctcggggattggctcgtctgtcgacacaatgaggattctggttagagctctcgataccgccctcgtcttcgctctactcaccgacagtgaccgtattatcggttaccggcatgacgacacctagccgcgccatgactccgcagatgaccgcgtacatcttgcctactccgggattggttgcagcgttctcgttcagagcttgcaaacacgtgtgcaatagacgggcagcttcggaaccggcaccacgttgagcggcgattcggacatgaatcgtggcagcgacgtatacggtatatgactgcgagcatgcgatgttgttcgattcggccggctttcgcaaacgatcttgcttctgtcgactcacaatcaaataaggcgcacgtgcgagtgagaacgtctcgcgatatcgatcaagtatagcagtcgacgatctggcagcggcctcgcaacgtgtccagcacagcgtcaccaaatctccatctgcttggtggtgatgtccagtctggcagagcaaggccgtggtttaagcgctgattctctattgccaaatggaggtcgggggctcacctcaacaaatgggcggtggagtaagatcacggaggagtgatagagtagactgcaaagcgagtgtcccgtcgacgtcgtttacttctcacaggcgcacgccagactcactgcaacgataatacgtgaggcggagggacgacctgttccgggcgggtcgggtcatatcgaatctcgaccggcaattcggtctgccacttgtccaggcagcgggagagaccacgcattcgtctttcgggcagtgggtccttggtttccgagtacacgtccgatatgattcggccctggaggtaattgccttcagtatcggtgtcagggtcagacatgatccccatcgagatattcaccaacaaagtcgacagagagcacagagcggtaaaagtagatatcgcccgggcgggagatccgggataccgatacgaaccgccgaaagcaaaaggtgtccacagctcgagctcctcgtaccggtccaggaagcgatggggtacgtgcatgtcctgctctttgaacgacaccgggcgaccttggtatagcgatatgattttgtcgtagactgcaaggcggacgcactatcagcacgagatcacctgtaaagtcttatttgacttgccgaaagcagcccaaacgatgcgacgtctgatctctagctcttcgggcttcagcgtgggcgatccgacggctctatgatgcatgtcatggtgtaggcctaccaacagactcgatcagtctttgctttgttgcaccagccattcgagaacagcatgcctacctaaatccatgatcatgcggaacgcgatcccgctatacagccaagctgccgatgtatgacccagtgcgaacaacgagctggacagtaacagcatcgcctgaatcgtcgggattgacgactggtcgagagcctgtccaagcagctctctgactcgcctgaggaaccgcttccccgccgtcttctgatcattgggatcgtcgtacacctcgggtcgggtcgaaaacttggataccgagaagaagatggcgttgagcagtagtttcgaaaagtatggcccgcccgaagccatatcgcgagtgaagactgaagcggactacgtcaataggcaatcctgccatcctacccgcccaagtccacaaacttacggggtcggtacgtgatgaggaacgcaaagtgctggcggttccaatgcagagcaaggagatgaaccgccaggtcaggtggaacaccgtcgcctagagtgacttcatactagtcagtggacgcctgcagtgccgatgaccatgactaacaatctagtttgccagatgccaaattcaccatctctagatgtctctgctctccacactcggctgttgcccggtcgaccaggtcgttctccgagtattccggatattgcatctccgctgtcggctctggagtgttcacatcgtcaaaaaaggccgaggtgggcccatggggtacggccggactgagacgaaacgaccaggacgagtatatcggtctacagctcgatcacgacctgcccggtatggtactcaccgagcgaaagatgccctctgttccgaatgttctacgggctgagcggttcgtccgtccagagtgaatctgactgacgacgacgacgatcgctcgagactgcttggttgtcgacttgtgccttcgggtgatcttgatcgagtggatatcgttcgggacccggaagggtatcgcgaagtctctggtactcggttttcgagcccagaagaaacagggtcgatagtggtcctgacatccaaactactggcgacaacattcacaccatcggacggagcgagattcgagcctggtaccttgcctgtccgagaccagctcaagatcgcccgatgcgactcgtccggtcgaagcaaagtcaggcggtccaggaacgtggtcaattcgtcgagctgattgataagggcgtcgatctgtccgtgcgtaggtctgaaggtttcaatccattaaatcgttcagtgcagccggggtttacgatggaggaatagaggactcgcctcgctcgcttggtccggggtacatcgacacactccttctcgccgtggatacagttgccgcactttgggtaccccaaatcgcatttgagctgtatgcattcgagatcagatcgaggacgtcagaacccgctaggcacatcgtccttccacaatgttgccccgttctactgaccttcttccgatgacattgcatgcacgccaaggtccgtcgtcctccttcgggcgtcggcgaggccgtaccgttaccctcagcgttcatcgtaggctgaaactggtacgaagggttttcctggatgacgcacgaggttgtccgaacggtgactgcagagtgtgtcgacctcggcagatgattcaaggtaaacgaggtacaagttcataggtcggtttccctcgacgtctctcggcccagcatcgtccgcgaggtcgagtcaatcgacggggaataccaacttggtcgccagacttcaacctgggtttcacatgggagtgcttgacatatggactcgcaagcatgatggtatatcagtcaagcgggtccttgaaaaggtacaatcgaagcagaatgggaaggtcagacgacggaggttcaaatccatgttacagccggtcgatcaaccagttgatctctcttgggcctcgcaaggacgacccggacggctacgatagttactgtagtatcgccaatcacacggcgaccgctgtcgcattatatacttccctaagcttctccataaaaacgaacgtcaaggtcgttgtcggcgccatgcgcaaccaagccggtacccaaccccggaacaacgctttcggaccttctttctggagcaactctttcaatatggtcaaaggtccctacagggcatcagggcaagtctgtcagactggaacaacgatatcaaaagcggcactcgacctaccacgttgccgacggacgactgcacacgagacttgatcacgtcgatcggagctaccaaggtcacggccaccgttccacccaacgccgatgacaagacgtgggtccgcatgtcgttgccaaagtagccagtggacatcaaagcgcctttgaacatgtcatagctggagcgtcaacatcgtatcagcagtgcacatcccgggctctgggacgaccgggctcgatggactcgccatgacaattgactggcgttcatgacgacactccttgccaatgtcgatgacaagcctctgagtgtgttggataggccttcctctcgggagatccgaatcaaaccatcgatcgagttgtggtagttgagacgcagctctggcggcttgttggcatccgagcacattcgaaccagtacgacctctgcatgacgagatcgaggtcagccatctcctgtcctttgacgttacactagcactcgatctacctgccggtgcacctacgatccctgctactactccggcgatggccccgttgaaccatagcggcgccctcggagttttctccttgagccacgcataaatcccaaacctggccgccccgtaggtacactgcctgagtagacttgccgacaacccggtccacaaccccgaaacgcctccgtactgtatactcgtcttggccgtgttccaaacgttctgtcgaaccttttgcgtttgactacgaattttggtctggtcgatcggatgagttatacagacggccatgcacgccgcggcgcctgttgaacaggagccagagagccagtatgtaagtgctttcggctttgaatgttcaccaccgacccgaaagcctcgacttgcctcccagccatggcggttcggaccgtttagtgggagctcttatgacgacgacctcggtcatacttgacaaggagcgcgtaggtttatacctctgtcaattgtgagtgtacagatacgagccgatacatattcgagaccagcgtagatcttctgggacccaaaggtctggcccgacgtcgaccccactcgttcgacactcgaccctagacataggacggaggtataccctgtcgtcggcgacttggacgcaacccgccggctcggaaagtcattgtccgatcctcctaccgacgagggcggcgctctttccggcgcagagccatccgtttcacgggattaccgggcgtaactccgggtgtccgtgcgtgcctcaccaagactttatctctcaacgccagatatcagacgctcggccatttcaatgtcacttatatagggttcgtagtagcttctagaccgaggacccgctatcaaccccagtctactcgagacgacgcgcctcacaagagcaacaatcattccccatacagcataccattcaccatgttatcctctcgcaacgccacctcatctggaccgtcgcaaatgctcagtctcaccgcagggatgatcgccggtgcagtcgagggtgcggtgacctacccagccgagtttgtcaagaccaaagcgcaattcggaggttctaaagccaacgtgagctgtttgcagtcgtgccggcactccgcagtcgacatcgcctgatcatcatcactttcgtccattgggcgcgtccaggctcccaaattgtcaactatcatcactcaaacagttcgagaaaagggggtttcaggattgtactcgggagcaggcgctctcatcgctggaaacgcgttgaaagctggagtccgattcatgacgtacgattcgatcaaggcgttcttggtcgaccacaatggtaaactgtcgcccgtcaacgggatgctaggtaagccggtggtgtcgatctgcatacggaccggcgagctgaccatgtgatgcgaatcgcagctggacttggagctggtgtgtgtgaagccgtcatcgcagtcactccttccgagacgatcaagtgagccagtcggagtgccgcggaccaagtcgactgggaaacactgactgacttgccttctcactatagaaccaaattgatccacgacaacgcctcactgaaccccaaatactcgggaatgctgaacggtgcgatcgggatctatcgctcagaaggtatcggcgggatgtaccgaggtcttgtaccgaccgtaagccctgtctaaccccaaacttccttatcgaggtcaacacggctcatgatcgatacgttgcagatcatgaaacaaggcgcgaacagcatggtccgcttttcgtcctttaatgcgcttcaggacgtcgcgcttcggttcaaacccgcagggacccaaaagctaggctcgagcgagaccttcgtagtcggtgcgggtgctgggctcattaccgtctgtgagtccgtggagatagtatcatcttgatagaatacagctgatccgaatcggacgtagacatgacaatgccgttcgacaatgtcaagacccgtatgcaggcgcttggagccgagacccgatacgccaacagcttggattgtttcaccaaggtgagtcataaagtctcacttttgcgacgcgcatatcgcttacgatgtatatcgtttgtagattatccgagaagaagggacctcgaggctttggggcggcacgacgccaagactcgcgcgattgatggtgaggttgtcagcctgcggacatcggatacaccgggactgacatgtcgactcatccacagttgagcggagggatcgtgttcacggtttatggcaaggtggtcgaattcgccggacgtctgtaattttgactcgtcgtcgtttggctcctctcgtgcctcatctatacccatcataccctcgctgcgcttcgacccatgactacatcgtcacaaacccgcgcacatgtcgtatggctttccagatgacgtctcagaagggcgttatggcccagatgtgcccttcttcgttgtcttcaagactttctccagggtcaactgctgccttttgcatataaaaggtcgttgaacgggtcaaacttggctgtttgtccagtcgatttggatttttttgcatccgcgttgatgacgaatcccaaatctccctttctagccgcttgacaacgagtgactcttgatcagatggacttcagtaaggacatgaaagttgatccagtctttaggtattcaagtgatactgccaataatctccagatatcacgatagtctcactgtgttctcctttgcctcgaacagtacagaattcggctgtcccgcaaccctcgtttcggtcagacctctcccgttttccgttggtaagctcgaagcttcatatgctgatcactgctcgtatcgtgctgatcgctctcacatttccacatcaccaattcatagcacagaaagaatacgccaaattatactgcagcaagcatgcccgcccaagcttgtcctgacggactcgtctacttttgcatggcctcgatcgaagcccatttgcgagccggatcctccggtccgtccggctcgaggcccagcttgcgtacctacctggagcagaccgggggagtcgaatctgatgccaagcaagagtcgtgagtaccgctcgaagcgggatcgctaccggaagaccaactgccctggttgtagcccgctgttcgttacctggaacaagaggtcctttgcctatgacgagacggacgcttcgggccaccaggacgacgacgaagaagaggatgaagacgatgtttctctcagaggatgtatcgggacattctccccattgcctttggagaagggtctaagggattacgcgattacgaggcgagtgcggaatccttccgcagaggggtcttggcttcgagtactgattgctctcgcggacaatctacgatgcagtgctttccgggacactcgattcagaccgatgaccgcggatgagctgccttttctgcagtgtgggtgagtgaagtgtggagagaccttggacctagcatcgagccgacacgatcgacccgaagcgtctccctcttgacgcccatgactccggccgacgacccgctcgactggattctgggtcgccacggtatccatatcacgttccaccactctggccgacgatactcaggtacctacttgcccgaagtcgcgcccgctcaaggatggtcgaaagaagaggccatcgaatcgctcatcagaaaagccggttatcggggcaaggtgaatcccggggatgatctgtggcgatcgatccagcttcaagtgtacgagagcgtcaaggccaagaagaattgggcgcagtaccagcggtggaaggcgtcgaggggtgaatcgtagcgggaacctgtgtgtacgggaagagtgggctgcagcttcgttgacgcggagcaaggcacggctggcaggttgacgtggacatggactcttagctgagacggtcccttccggtttagacccaagtatccttctgatgatttgacgattccacattgtagttgtatcgagaccggtgaatatgactcgtattcatgtccggaagcaaatttccattggaatcttcggaatcaaatttgccgagttccgatcccgatcgagtggacgtcacagctcatcagacgttcgtcgctccatatcttgtgatcctctgaccatgtttggatatacagaccccgcctacatatagatctccacgcatcaaggctcttctcatcatgtcttcgaccgaaaccctcgctgtcaacccgctcgagtacaagtcggcacctgccgcgggcgagaaatgcgcctgggtcgtctttctcctcacctcgccttcctaccttcctggcatcctcgtcctcgccgcctcgctccgtcgatacaggtccaagtaccctctcgtcgtcgccatcaatccggctcttcctctcgagactaggtcggctctgcaagaggccgggctcgaggtccgagtcgtcgaacctctgcttccttcgggtaaagtcaccatcatcgccgaacgattcgtcgatacgtggaccaagttggcattgttcgatttcgtcgagtacgacgtgagtgtagctctaggtggctcgtacactcgtcaccttactgaaacgttcaccttgcgggccctcttcccagcgactcgtcttgatcgacggcgacatgatgctcaagcaaaacatggacgagctgttcaacattccgctcaaacccgatcagatcgcttgcaactttgcttgcgtttgcaatcttgacaagtcgagctgggctccggaagattggtgagcccgcgcttttttctcgcatctctcgctcacgtggattgacaactgtctctgacccctactccaggacaagggagaactgcggctacaccccttctcaccatcccgacgcgctcacccaccctcaacccgctcagatcgacaaccctcgcacccattctctgctcaactcgggtctcgtcgtcctcaccccgagccacaccaacgctcagacgatccgtaacctcttgacatcgacctcgatcgccgaccaggaaaagatcgcgagctggatgttcccggaccaagacctactcgccgacgtcttccggggcaggtggatcagtctaccctggtcttacaacgccatcaagaccatgaggtattggcacggaaatttctaccgggacgacgaggtccgaaacttgcactatatctgcgataaaccttggcaacgtcggcctacccggaactcgcccgaggaaacggcgcagacgggactggtgtacaaggtgaccccgggggactttgccgggatcaaagacgagacgttgggtatcccgtcgaacgatgccgatgccgtgacacacggttggtggtgggaagagtatgacgagatggtcgaggggatgaagcgggacggatatgcgtgggtagactacctggaaaggctcgtcgctcagtagatagcgacagtacgtggatcgagacggaagccatcaggtttggtttattgtgtgcatggccatgttgatatagtcgtccggccgaaatagatctaggctatgctgtcgtcgagttcgaaccgtatgcagtgtaattgtgtgacatgaccataatgatgctagaacggcacatgaccgcctcaggacctagcgatcctctgctgaccgcctttgccctgctgctttttggcggcatcgtcgaaccgcctgacgatgacttgacaacgggtctcccggcaaagctctttggcggtcgacttgatctgaggggaaaagagggtcaatccggcggcccgttctaccgcttcgactggaaaaggtcaaggcgagattgattatcagcatggcactcgtttcccggaacctggccgactcacctggcacgctaaagtcggtcaacggggtgtgatccgggatcacgctgttgggaagtacgaacgccccgatggcgacgtctttgcccatgggtccgctcacgggtaatgagctcgagctgaagcctccaggactacctcgtgcagcgaggaccactttggcaaagtgcgtggggaccgagatagcaggtgggtttccgatgacctcgtacgactgttcgtcgagaatgacatatgagccactagaggaatcaacttttggccacgaactggactcacgacccgccactttccatccggaccttgagctggcaaataaagaggaactctttgtggcgatcacgttgacgacgacgacatcgtgagcgactcggacccgtgtagccatcgccaaccctcgaacacccacgtaaacacatagacgtcctcgaacccgcccgtacccttcatcccttcatccctgggcctgaccagacgcctacaccaatcctccaagtacgcccagtaatgtctattgaatccgtccccgacttgaggagcaatgtttgtcaggaaaaaagtctcatccatggcctgttgggagatttctatggaggcgtcccgaacagtgagttcgggtcagaactagcccggacgtacattgggtgcgtgcgggctggctggctggactcactggcatccgccgcagggaccatatgacctcgatcgtatccactcccatagtctacgagcggtcgtctgtcagtatcagcgtccacgatgcggactactaggtcacgttcgtgcgactgacaatctttgagcagacctctgaacatggtggggacctcggcgtcctccataaaggtgctcttgcttcgatccccctttttcgaattatcttggagcagtcccggacgagaagcgttgggatcgttgggcgggacgggttgacggttgagagatgtcggggtcaagtgctcggcggtctgtggttgtggacagcaggcatgtcagctacctggaaggtcgcattcggatagatgcggtcaacttgcccatgacgggtgtctcagacgtcgatcgtacgctgcgacataagctgtcctctttagaatatccgggataggtcctgtggcagacagcctgtcagctacgacggggcatcagactccagatccggacctgaaccgacctgggaaaccatatcgaaagacgtccgaggcgagctgattcgagggggaagacgggggcgctgccgctgccaatgctcccgccacatctctactcggcgtgaaagtgggtcttcctccttgagctaccaatccggtgctcttttcatcttgtacgacctgagcccggggtggtgctgatgtcgaggccagtccgaggttgggattgttcttgttcaacagggaagccgcaccgactccaacggcgagacctgccgcgaatatacctccacggatgacgttggaagctggcatttcgttcgatctctcggtatggcctgctacaaagtcagaggtgaggcagctacagccctgtgatcgaggttggaggatggtgtagtggacttagatgcaaggacgtatctataagtttatcgattgaaatttccgtcaacttgaacttttgcgatcgccgggctcgggcgagaaacgggaacgagctcgagctcgagctcgaggggcaacgtacatctgcatgcatgtacaaccatctcaaccccttgattcaatagcaagcagtcgcttacgtttatccctacaacctgaccatacagctcagtgtcgaccacctcggaatgtccgcacccaacgcacaatcattcagggatcaactctccgggttccgatgggcacgaggctcgaacgacgactcgcaagcacaggcgacggccgcaccggcatccaccaacccgttctctcgtatgtacagcagcgtatcggagtatgtacctcttcgaagtggtcagaggagtaacgaggaggaaagttatatggccctgtcgagatgggaaaggtgagtgtcggctcggtcatctcgacgtggtcgtgatggatggtatctttgattaaccgccatcacatcgtgttgccggaacagattcttgggcttcctggcatgtctcgccggatctgccatctgtttctttgtgtcattcctcaccctacccatccgtacgtcgttgcagggactcacggatcgagcacgcagcaagaccagcacgaagggcactgaccgtcggacctcgtcatcatatgatagtcgccctcaaccctcgaaagtttgtcatgtctttcaccctcggatcgatcttgttcatggcagcattcgccgtactcacaggacctctcaactgtgggtcttcttggccggtaccttcataccatcagacacaccgaggctgagatgacccattcaacacgtctcgattagacctgaaacacattgcttccaaagaacgactccctttctcactagcctactttgggtcgctcgggttgaccctcttcttctcgatcggggtgaggacacgccgtcgaaacgtctcctcggtgcgactctgcgtggactgagcttatgtgcatcgtccatacttgttcccagcttcgaagcaagatcttgaccttgctaggcgccatcgtacaggtcagttcgacagcacctgctgctactgcgctccgacgacgccgaggctgatgtcagactactctttgatccaatcatggtgacccgccagatcatcgctctcttggcctatatcgccaaatactttcccggtggtgtccaaacgttatccctcggcggtcagatgcgtgagtcgatggtggtccccgcccgatggaccccgggcttgacatatccggcacgcccaaccgaccgactgaatcttgattctcttttcgctgggatcgtatagtgctccgtggcgggtcaagcatgttgcccatctaggtctggttccgatttacaacatcatgaaaggtggcatgaatccgacccgatgtatcgataccaccttgtatacatgtatacgcatgtcggccggtcgtttgctgagctggttctttcccgagtcgatactgtatccggccgagaaccaccgttattgaatgcaagacgtcgactggcattgatagtcgtgcataaagtgacaaggaagtgcaagttgagatggggaacagctttcctcgcctcgtagaagctggatcgaacctcaaacgccgaggtcgtccgtacccacgtcgacctctgggtaacatggaatcgagtcgatcccctttgccgaatcgacaatcatgtggggctcgggtcaatcttgtcggcttgatgtcgaatcactttggttcacattcccgtgttcatcgtgcttcatgcaagaatccgacatggcggtacagctcgaacgacctttgctcctggaagcttacagatctcggtagatgtgggcggatcttcgtgtcggaattttatgatctcgtctggaacgctcatgttgaccacatggtctaatctgatcgtactactggtagtggcaaggcgaactacgatagaggacgtcgtcatacgattcaagccacatgtgagaatggctgacgtgatggttgtattttggttttgctgacatcaaccacctcgccacttcccaattcaggaagcgatgcacccgaccgagcagagtatcggaagccacggaaccaggagagacatggttactcgtcatcaaacatccgggccgaaccaaaattgtccggtatagcttggaggatgaccagagggatagagtttagacattccagtcgagtgacccaggacacctgatcaacgacatcatatcgtgataccgtagtcaaaggcgacccagacgggactttgacgatggaccaaccggaccagaccatgaatacggtctcgacatcagactcggaatctactccaaagaatcctcctataaaccttgcgaacagtccatcttcaggccggaaaacagggacacagcccgtgatgacgaccgatggcgatccatcaaacggttcgaggactaccgaaggtagctctgaatctggtgctaccaagacgaaccgattcgtaccatttccagcgtcaaaagcgtgtgatgtgagtctaggcggtcaaccacgatcggcctacaaggatattccaactctaggctgatcgacccggtcatccttgcgtgtgatggtagatttgtaaactcaggtcggtatcatgcacacactatcgcccgtcattagccaaagctgatacgaagatcgaacgatgcatctgcgtgaaacagaaaggtcaaggtaggtctccatcgaaaccagtgacgtaccacgcagacatacaaactgacatcccggtcggtcccgttctccagtgcgccggaggtcaaccgtgccatgcgtgccgattacacgccaccgaatgcgtcttcagcagggcgactaggcgacaacttttgcaggctttcaatcatgcaaaagtatctcccccaccggcatcaggaggaacgtcgcagcaggttgagccgcaagtcaaaatcgagcccgctaatcccggggctctatgtctgaaatacccgctcgacctacacagatcgacgaacatgaccccttcctttccgaccgtgcggatgccatggggacacaagcctcttccgatcgattgggactcgtccaagttcgggggaatgcccctcggagcgttccctgtcgactggtcaggggtcaactgggcatcaccgcgaggctgtagtccaggggccgacacaagctcgggagagtcggagcgagaaggtcagcacgatcggttgcccccgggcagcaccgagagccagcttgagctgacgccgaccgcgatagagcgcccaagagagcagtccaacttgagaatacggaggatgcgcgaggatgcatttgggaacgccgggttgatcctctgcgagggacagtcaggcagtcagaacatggaattttggggtgagctcggagccgtaccctcgcggtcaccttggcctcgactgatgatcgtgagcggagctcgctcggttggtctaccaggtctcacatcttatattggccttcaagacctgttggcaaggatgctccaggcccgaacacaacattccccggaaccgatcggccggagaatgtttgagcagaaccgcggcgacacgcccaagactccgcgcgctgatctctggcgttggggatgtgagcgttacatgtgggtgcgaactgtgcgcaaggttgtgcaggatcacccaatctgagatcgatcgctcccctgcagttttcataatcggcttgcaaatctcgacatcaccaacccggacccaacgttcctgccgtctggtctggcgtatcgatttcttcacgagtataccaaggtcttgcatgccctcttcccggtcctcgacttggccgatgtcaaccgatcgatagacgcatcatttggcactccgggtccgacgcccctccgcccgtttccggataccgaccgtgcaccgacagaacgagctcgagacctgctcgtgcttgcgttcggggcccaagtcatcggtggcgacggagacgcacagtgtccccgggacgtggcgatcgtctggagcgagacgttgcgcagggcggcgtatacgatcatgaaagagttggacgtgttcgagggtggagtcgacctgattcgactgtggatcgtttacgccgagtttggtcgaaattatggcaacagtgggggtgagtcgagggccgagcacgttctgcgcgttggcgctcaagctgaccgccaacgctcacgcctcgtacagccgaacttgaggccgccaacacggccgctcgatcgatctgtcgaatggggctacacaagcgagggacgtacgaattcgagcctgcacagacgcacgactatcgtacggtctttgccgtctgtttctattccgaaaagtgggcttgcctctgccatggcgtcccgtcgaccctggtctggggcgccgatgcggaagagattgcagttggactggacgaggcgagttcagtcccatctcgatctcgttgggcgtgcgtctctactgacctcgtcctcgaccgaatcggatcaccttagggctcgcgtctctcgaccatggtcgccgtggcacgattggcggatcaaatgcagagcctgttcgacgacctaggcctgctccctgtcgaggcgggtattcgccggtcgctcgagatgtatgaccgcgtgctcgcctttcacgccgggctgggcggcgcctttgacgctgtcgagaacgcacgggtcgagctacttttggaacggatgggaagcgagtatcagcgtgtgctcgtgctcttcacgatctacgccatgtaccttcaggtcaagacgttgtgcctgctgccgatgctccaggtcagcgtgtggcgagctctgggccggagcgatttccaggtcggattcgagatggaccggtatatcgaaggcttggcggacgaatgcgttcagacggcgtgcgatacgatccgcatgtttgagcggcacatcgaaatgtacccccatacccccgaggtcagtcgttcttgtgactggtgcacggccttgtccgagctgaccgatgcgacgatgccttgtccccgatagctatccctctcgtccatcttcatgctctacgccgtttccgtcatctacatggacgtcttgcgtctaccctcgagcgtggcttcgacacgtcacgccaacaacgtccagacggcgttgaacaagcttgagcattatcaacacccggctgctacattggccgaagcgatgtgtcgggacatgctcgtcaattttgtagacgggaatgacgcttaaacggtcgggaatatggacccgatgcatctcgatggttacggaacgtatttgagtttaccatgtgcatgatgatataatgagaattcgatcgaccgcaactgggcgatcattataacttgacgcggtacacacgtaacacatccaagagcagaaaaagtacgggtgctagtgacgatatagaggaccgcgatacgggccaagagcccgacgtgccgtcgcctagccagactgatgaccccgtgtctaggacgacgtcttgggggtagaagccctggacaagtcaccgacgggcagggtgaagtgcgaggtgtccttggtgagcatgcccgacaaagcgatgtagtaggcgatgaaagccgtgatgattcctgattgacgaaacagaccccttcgtcagcgactggaatggaaggagtggcttgcaagttcgggcgggggagcctcaccgaaagcacctccagcggtgtgaacgctgctcatccccgtaaactcgctgatgaataggagcataaaggtgatgtccaagaagaagaacaacgaggagagggcgatggaggatttgagcgaggcgacaaagaagatctgtcgtgcgcgtacgtatgcgagagaggagcatgatgatcagctggtgtggcaggtgggggcgagacgggaaggccaggcgaactcacaaaggtaacgatgaaccaggaggcgagatagatcccgacggcgtcggcgaacatgcctggttcgtcagcgtaagcgtcaacgatgccgaactgggggactacagacggaggttgtcgaacgatggttagcatttagaccatcactgcgacgctgacgctgctactcactgtagaggaacccgaaactgatccagaaccctccataactgctaaacgccgtggccgcaaacgtgtttcccgacgcaaattcccacatgcctgccaaaagctgtacgagacctccgtagccgatggcgagaccgaggacgacgttggggacgctgacacctcgtgctgagacgttgtacatggacaggacaaacgtcgtcgtcgcgaacgacatgagaccgagtggggacgggttggcaaactttcggtggtagactgcgggcacgaacgcgggcgtggcgggggacgatcagcatcgctacatcacacaccgacgatatgtgcacgaaaggaggagcgctcgctcacctgggaaagcgggctggctgttatcgatggggttaccaccgggggtgatgaacctggctacacttccgcccgaaccatcgtatcgatagtcgttgtggtggttgcccccgttgacgacggtggacgtctcggcgtcggcatgagatcgcatgggtttgacttcgttggacatggtcgtcgaggtcgtcgtcgcagtgatttagtgaggttgttgagaatctgcgatccaaagattgatgtgaataggggcaagaggtttgtttgtatcgcgtgtttgttgattggttcgagtcggatgtgtgtgtgtgtgtgtgtgtgtgtgtggggcaaacgtcgacgagatcgagggggcccaccgagtcgagagaggtggtgttatatataattagactagatcgctgcgactactcggacctgttcggcagacatggacctgttgtgcagccagcccagcaccttgaatgacacatgccgagtcgaagaaaaaaagaggcgggacgatccgaaattagcgccagaatagcaggtggttgacgtcggggagagggggagggcaaccaccacctccactccattcatctcggcagacgtcatctttcacaaagagaacaccatgtcatcggcgggcggggggcaggggtcagggattcccggtgaatcggtcggtatcattacgacgctcttttcgtccgtccgtgaacacgttacctggagcagtcgatcgaccgtcgccccccgacagacctcgctcgctccaattcggccgcggaatctcggtcgtcgtcgtcgtcgtctcgttccgtcacatgtcgcatgtcggggctaaccacacttcacaacacctggagctttgagacccttgacagatcccgttccaaggcgtgctttgcccaaaaagacacgttgggagccatgaaacggaaaacagtccccagaatttcatttttcactcactagcgaaagcgagtgccccccttcccgcctgccggccgaaaataaccactagacgagatcgttttcggacgtctcgacgcctcgagtggaaaggtctgggtcgatcgaccgaacgaccgagcgaacgagctatattcagtcatcttgtgaggtttccccattaaaagcccggtgatcccggtgacaggccgaccggatcgatctcaaacgcctgtactacccctaatgtattcgttcattccacgcttgttcattccccgcgaggtagtactcagagagtcagtgtctctctctattcaaccccgagtcctattctttttctgccgtctcgtggcatcgaaaaggtattcgtctcgacggccgtgggtcgaacgatcgtccgtcgtcctgcaactgaccgatgaaaaatccacgttcccgagaatcctccgcacaaagccgagcgagcgagcccgccaatcaaggggcgatcggtttcgaaccaacttgcaacttgaaacattgtcgagacgtatgagaaaaggcgcagggaggaggaggaagacatcctttgattcttggcctgggctagtttgacgacaagaggttgtaacatgtttcgggggtttggtggactagttggcgaattgtcaagatagttagcgtctttccgagactcgtcactttgcttaacgtgacaaaattggacatcacgacccaaatcgttacaaactacccgacctcgcaggttgccccttgactttgaccgacgacgctcgcagagatcacggaaacttcatacgatcctataccttccacaccatggcatcccagaccatcaacgcgcgtagcgagattgacacctcgaagatgcgtgttgacccgcattcggcgatgaaggacacgcacgtcccaacgtattgtcttcccgaattcggcaaggacggggtcgtcaagggtgaattgaaggacggctactttgtacctgccggcgcgatgttacctcgtacgtcccggaacgtcccggatcgtccatccgtcatgctgaccttcgcgcaatagtcggcgcagggatccagccgggtacgattctcaagtacggtgggtattttccagcgggtacagctttccctaaaggcgtgattgtgcctcttcacgcgaggatgggtgagtcgccaggtcgctattcgccggccttgggtggttggtgtcacacacgtgtcgctcactgcctattctggcggggcctggtcgatcagtgaatgtgttgcctgcagagacgatcgatccgccggccatacagagggaagagatttgcgtgatcatgtaggtcggttcgcccataggaccgaggggtttcgttgtaaggacgatgggaaccggtcgatttgaggatgacatcattcaatgcgtcgttcaacaggctcacgcgccagtaagaattggcgcgggaaggataccgcactgcaacccgctcgtgacacgaagaataccctgaggatatgagtcaaaggccgtctttgtcttgttattcggtgagcacgggcagaagttgatagagtcgactgtactgcgtatctttcctgcccgtcggttcctcaaggccaggatcagatagagtttgagagttcctcggcatcgtcgtccacgcgaacgcgtctcaaagggaaggggtttcagccgccctttgcacatctccctttgaggaggaggatgtgtaggcggcacctagaggtcggatatatccattgttcaacacagatcacgaatctacaattccctaccattcttgccaggaacgtcacatgatgcctccgcctacactttgggttgtttcacgctattttctgcttgtgcttggaactcgtatcaccgcaatacccacaaataaagacctagatatcaaagacttgggtctcattaacgcatcgaatgacacatcagatgccctggcggtgagtctgaagccggcttggggttgagactgagctgatgcatatgtggaaggttgatcagtggtgggatcatggctacggagagcccttgaacgcggtgataagcaacaagtctcacccttcgatactcacctcgctagactcgtgggcgaaaccgtctttcaaccattacttcctggcacactatctgtcaaacgaatgtctcggacagcaaggcccgaacaagatgcttgctaatttgcaagatggtcgaggcgtggtcgaggaaaggggtcttaaaaggtggacttaccgggacgactacctcggaacatgcattcagacctttgacggcggccttcattttcgatatttcgttcagaacaagagcaaatccaccctgcagtctcccggaggcgcgatctttttggccgtctcggagcaacacgacctcaagcgacatcacgacatcgtctttgacggatataatcttggccgagattatctcgttggcaacctgacggggcagagagttatgaccaaacgatctgacaccgcgaccggggtcagactgactgccatcactccaaacacagagtaccaggctaccaagttctttcaggggatcgactacaagacgtccgtccgatactattcaggtctagctcgaaacaccagtggtaggtcagaagcctccaggatgataaagggctcagcgcaaccaagctcaacctcttctatcgacagagaaaatcaatcatgaggaaaaggttactactccaggggtaccagccgtggatgattgggtagcagtcatcacgatcgatgtaaataagaaagggtgtgttagcattgggtctggaactgacccgcaatagctgatcagtacagtgtaacacagagcggccttgcgtgcgggtacattaccactggatgtgtcaaactacaacatagcatacttgataacgatctgtatgttgtatgcttgtttctatgcttgatacacatctatatgatgacgttgcgagatgcttttcgcttatgagagaatactgttgcgaggaactcctgctcaaggggattctagggggtacgacgtggtgattgcttgattatcgcgtccggacataagacccgggacggctacgatcgtgccatttctgccagtgcgaggatcacgatttggacatgaggctgaccggtatcgcacccgccgccgcggatagccaaccaattttgagtatgacccatcagagctcgacgttctgacggattcaacgggacacctcttgcgtagacccgctctttcagcttaccagtgactgtagtgcggtggattcagcttgacacataaacgtcatcattaatgtcgaaacttacggaactgaacctctatcatccaatcttgcatacccttcatcggacctcccaagatagtcatcggttcgagagctctacagtaccacctgcaatgtcaattggagcggtcttgagccttgaccacgacgagactcaccgagcaagaacttccgtccatttttctaccatcatatgctggggggcgatcactcctgctctcttgagtgagttgagatctcgcaatacccccttcatcatcattcctgcgtgttgcctgacgtgtggcggcgcatgtcccataggataaggtaaggccatcccggccgttggtagcggcccttgtaccgtctttttgctgaagagacccatctttctcagggttagcgcgagggggaaagttgaagctgtggtgtcttgcccaagatcttgcgaattatgttgaatgctacgtagagatattgatccagaggtcttataggcgacactctcgtaggggtctcccaaatcgatggtgtcggatccgagtcgtatgatgtctccgatacggcacggctaccgactggagtccaatctcgattatttgaacaaaggagacgagctaggcgaagcgaggcggcggagtgtgaaatatatgaacggaaactgggtatatcgttgagggtatgaggtcaagagacgatctatttggtgggacaggtcagagctatacgaaatggatatgccgtctcggatggaacgctgtcatccaacagcaatcgaaagcacccaagatccacttataaagttctcggttccctctctgacatgcaagatctacttccctttcactccgagacgcgttcatcccgtcgatcgccctttcatctctaccgtcatgctctctgaaacgtctcggagacacggagtcggcctcttattgactgtagcacagcagtggtctgaatgtatggggattcaatgtctctcccatctctacgtgccggtttctgtatccaactctggccagttcgccaaagtccgcgctttgcctctgtgcgcttcgcaagcctccacctcgtccccaacggtagcgggagcggggaaaatgacgtcctcagattctagttatcgtcatttacttatccttctctaccgccataacctcattgttcaacccggggtgagctgtctaagatgcagacgtcatgtttgcccacgatcagattatagacgatgagtatccagaattttagcgctcagtccttccaggcatcgctgaatccagatgatagaactgggcttcgccagtatcgagcggccgatctcacgaggagtcatgttccgctctcttctcaatgtggctataaacaagccgacccttagccccgaggatcttccgagataccatacatatctagaccgggtgtgagtggtctgctcttcggttgtataccaagtcgatcaagacgaagacatgcggtttcgagcgcttctggcgaagtttcggatcaaggtgtgttttacatgcgtaggaacgccatgataatggcaattctcaccaagtagaccaaaactgtccgagtcggaaagcagacctggtagaggtggtaatcaggcgcctcgggactgacccggacgaatgggatctctaatccggcccaacgggcatgtgatgatgaaacttgacggtgatgtcactctcgataattctctcgacctctcggcgtttctcgctctcgatctggcgaatatggcgcgcgtcgtttatttgaatttgcttcctaagagctcaatatacatccgtcggatgtagtttacatccgaaacgctcataatgctccgttttcgctgatttcgattgaccaaccaggttttgtcgtttcagtttccaaatgtttaagcgagcaggagaaggaacggcggtgacaattggaaacacgcacaagagacaggaaaccaagcaagcgcatgtatatatatacaggtagccaagattaccccggagtatataattcccaagcataaaacgatgggcgccaaaacattggcaagatctccgggaactatacaaatctcgttgccgtctctctcgtccacgtcatcacgagctcaccatgcagttatatcctcgacatggtcatgcgagcgactatacaccgagcgagctcgccgagatgctcgtcgatccttatgatgatgctcccaaatgtaagtgaccgccccgggttcggtcggtctactttgatgctcatgccaaagctcgctctagacaccaaggcgatcatcggagccgtctgtggggccatcctgatcgcagccttgatcaaccgttggtcgcgttacaagttgaccgagtgagtctaatgtccgcatccacctagactacttcgcacatcgtgctgatcgacctggtcgtgctcgtctcgccatcagaaccggtgcaaagctcgcggcgaagcgtcccgttctccgggccaccgcggccgttcggtacttggcgaccgctcctacaccctcctttagccggtacttgcatttccccacccggggtgtcatcttcctgctggccgtcttctggacgtttgtgctcggtaggtgccagctcatgacgaccggaaacgcgtgcctttccactgatctgcccaccccacgtcatcatcgccagtttggtcgttcgctgtcacgccgtactaccgctctcgatggaacgtcggtagtcctcccctggccatccgaacgggtatgatggctctcggtgtcttccccttcatcctcgcctttggagccaaatggaacctcgtcagctttgtcacgggatactcccacgaaaagctccaggttttccatcaatggttctcccagctctttttggtgctcagcttgctgcatacgttcccgttcgtcatggccgggagggagaaacggccagacacggatggattgaacccgatgggtttgacccagatcggttacagttggcatatcggcaaggtggtgagtgcacgctcggggcagggcagagtctcatcgatcaagactgaatcgagcacgatcacagtattactggacaggagtcgccatgctgctcactctggcatggttgtgtttcgcctcttggacgcctcttcgtcagcgatggtacgagatgttcaaggtgagtgacttgtggtcgttattgaccccctccacggtcatggtatgctccgggctgaccctagacgacgaccgtccgactctttccagctccttcatatcatctcggcgatcctctttagtgcattcttctacctccattgcaacgctctcctcacctcttgggactacctctacgccacggccgggctgtacgggatctcggtcgtcatgcgattcggtctcatgttatggagaaacgggcggggcgtcccccaggctcagattcaaattctgcccggggatgcggtcaggttgacgatccccacgcctcgtcatcagtggaaggcaggccagcatgttttcatcaacttttgcaagacccgtttgctggagagtcatccgtacacaatctcgaacgacgctagcatctacgtgagtggaccctcttacactttctatacccgtcgacaactcccgtctcactctcctgactctcctccttgcttggcagtcacacaagcgagagatgatcatcgttctcaagacagacgtcaagggcggtatcggcgctcgtctcgcctcgctcgagcccggcacaactccggtcctcctagacgggccttatggtaccggtgccgatctctcgcgtcaccacgtcgccgtcctcgtcgccggaggcagtggagctagctttgtcgtgtccgtcttgcacgacctgtgccgtagaagcgtctggggtgaattgcagacgaagcacatcatcttgcattgggtcgtgaggcacgaatgtgagtggcgccacgttcagcatcgtcggtattttctccagctgatcctctgtgggatcgtctcgttgacagcctgtcgagcctggttcgaggaccagatcaacgccgccatcgctatggcccccaagggcatggtccaggtccacctccacgtgaccggcgtcgagggtcaatacgggctacaagtcgagtccaaggccgatagcagcgacgctaacgacgtcgaaaagcgagcccgtaaggcgaggtcagtgtcgccaccatcttcagttgactagagacggccgtgctgacgatcgctctcataacgacgccagccgctcaagtcctctctggaacgtctccacccaacggccgcatctaccttccctgctcgagtccgccttccagctgcctggatgcatcggcatcgcttcgtgcgggcctacgtctttcactgacgatgtgagaaagacagtcgcggccaagcaaagaagcatggctcttggacatgacgttcgagatatcgaactccacaccgaagagtttgattggtagagttcgatccttaaatttcggatcgatagcgtcgttttcaccttgtatccaaagtagcagctggtcataccatatctcgatcgtgtccttgtgaatttgctgcgatttcctcgatcatctgagacatgttgtcttgccctttgatgaaccatccatcgagcgaggcgtctcccatcatggcctcttgcttgaggcgaatgtccgacgaccccaacccggtgatggcatagatacgggtctttggtcgatcttgctcttgttccatccttcgcatctccctggccgctgtaacgccgttcattcgaggcatcgagacgtcggtgagtacgatttgcggtgcaaacgcccgaaacttttccagagcgtcgatgccatcgaccgccgtttcaatcttgaccgaagcgggctttgattgcttttgaatcagtcggaccaaaattttgcgactgatatcgttgtcctccacgacgaggattcgagtcggatcgaggctcgtgctaccgaaatcgtcgcttcttccccgtttagacgttggcctatatataactaaatccggtcggcttcccgccggacctttgggcgccgctacaagaaccccgttgatcactcgcccgatcgtctctcgtagatcagccacgtccgtcgtcctgcctcgaaggtcccgtagaaaatgaactgggcaagcgactgttagccgggttccttcatccacccgggattgcagatcgactgtgccgcccatctcctgaaccattccgcgaacgatatagagccccaaaccggtcccgatggcgaatggattggccttggtgaatggtcggaacacgtctttcaaaaaggcttcagggataccgcaaccagtgtcctgtaccgtcaggacgaaaccctccagatccttggatagctcgagccggacaacaatggaaccgtctttggtgtgtttaatggcgttcgtgatcgcattgagcaagatactgcacggtaaacaagattatcagaactcgcgttgccacgactgcgaagccatacccgacacttgccgttgaaacctcgctcgatctatccgcaccgtccaatccatcgaggtcgactcgaacacgatatcgacctcgcctcgcccttctgcccgacctatcatcatcgtccgcctcgtgagggactgcagatcgacctcttgttcggctttgggttcccttcgcgagatgcgtgcgaaatcgaggacgtcgttcagtatgagatcgagcgtagtcgcgctggattcgaccatttccatggcttctttcgcttcgtcatcgacgtgttgccggacgagctcgagacccgacaagatcccatgcaggggcgtccttaattcgtggctgatggaagacaagaacgtcgtcttggaagcatctgccgcgacgacccgacgttgcaggatgtaggctcctaggatgacgccgatcgtgttgataaagctgacgtcctcgcgactgaatttgaggtgcggcgaatcggttgtcaccacgatgcaaaacaacggctgagcctcggtcatgaatggcacgacgatatgaccttgggtagaggatggcaatgaggtttcaaggccggacaagtcgtccgcgtcgtaacgtcgagacttggaccctagtcgctcgagatagtcggccatgacgtgtctgtcgagtgccagcccgggcgtcgtggtttgcgccaggatgtcatggcgaccggccgctgcgtctgggtcctggacgtacgctgtgcgtcccttcgtttcctgtacattcggcgcagacacatctcagcgccgttcactgggcgacaccactgaccgagacccaccctcgctacgatgcctcgcaggtcgaccacggtcaccgcgcctgccctgagcaagacctgttcgatcttttcgactgcgagcctcgcgtgcttggctgagaggtcatcggcctcttccgtcctcaagccatggttatgtaccagtaccctttccgtgagttccgagacgaccgctctcgccttggccgctctcaaccgtcctgcaccgtcccaagtgctcctcaactgtctctccagcatacgggtcaattgtttcaacaccttgtcgccgacgttcttggccgactcgggatcgaacgtcgaggtctgcatgacgttgatgacgccgatagcgaccctctcatccgaatctcgacgcgtggggtcgatttgaagcgtgaccaccgaggcgcggtacgaccgaagacctccgtcgggagcgacgtacgggttacctctgggtagacgacgagtcagcatgcacggccacccgttctatcattggcctagggcgtgcgatatactgaccggtacctccagtctttcgtgagatccgatacgaccatgtcttggtccgtccagagcactgaatgcccgcacatgctcgtctctggcaagacctgcatgcccaattttaagcctgccgcgtgcaacacctcggggtctcccttgatggccacgaattgttgtgaaaggcctcgaaatagagtcaacgtgacgatgcctccgtaaaaggcgtgtatgagatcgacggtggattggaagttttcgacctgggcgaggccgagatcaaggtgagcaagaacgcgatgtactcatcggcgaactcgcatgacgtgatcgacgtggagaccctagacttacctgatcggccgagtacaagtcgtattcttcgacacactgttctctggctggttctctgtgccctctgggcgggggcaagaacccatacctcgcgtagaaatccttgacctttcccgccgtcgcgagatcgatttcgacgtgttcataaatgggagcgcgttcaaaatcgtcaaagttgaaaggctggtctctttctcccgttgacattgtcgggaggggaggcgaccatggtgcctgatctgcaggaaagccaccctgagagtatgctcggaggaagtcttgccattgttcgagctcatcttgggaacctcgttttgtaatatcctgctccatgtcggacgaccgcgtccaggttccgatcagtgagttgttgaggagccgattgccttgtgatgaagaccagtaggcagtagagaggtgataagtagtatgatggtgggtctaacccgtaaccatatcattatcaaacggggatctctatcaagccaagccatcacctagctctcccgagctgatgtccagttcgagtcacgtgacagtgacgacgtgcactatacactaactatatatgggtatcataacacacaaggcaaaggtcacagtcaatcccttgtcattgcaacgatcgcagactcgtctgacatggctatttggtatcacaagcacgacgtctcgtggccagatcgatcaacgaatcgtcggcgcgcacaggtgccttctgctgcaaggaccgccgtcgttgtcttctttccgttgagacatccgcacctcgaacggatctcattctgtagctccagctttggcctcaatgtcttgccacacactcggcggtacaattgacttcctactcctcacatagcgcacagacttgccctacccgcggacgaccactttgcgcaggaacgccgcgtggtagatggctagcggttgttggtagtacggtatccgctcctaccatcgttcacaagcaagtcgaggcaagagtatcagctttcagcgtctaaatgtacttttatctctcgctattgctggacctggtactgaccttgaactcttcataccctctacgcctgtaccagatcagattccgactatcctcatccgtcacctctgctccgtctgccgtgatcgggtagggcgtagtatcgagggtcaagacgtcggccttgaattcctctatggccagtctctcaagcaggtctaggcatagagaacctagaccgagtgattggtgtctcttgtcgatgtacagcgaggctgtggttcattccgggagtcgtaagaggatgagcgcgtctgaagccatagcaagacaatgctggtacgggagcgtctggtattcgtccgacttacagagtttgatggtcttgctctctctgtcggccatgaacctctgcgcgtcggaatcgagtaccaacccgcccatcccgacatcttccatcttcgtatcccgcagagtctcgctctcaccgtcgacctgccccgtttgttcgacccggacgggcacgctgaatatccacaagggggtatccatatttcccttgagatctctttccatcctctcgaggccccaaccgcattccaggcgataacgtttcaagagcgggtggtccgcccaggtggctcgacggtaggaaatgtcgtcgagcgtgtaacgcgcccgaggagattggaccgtcatcgcgagatcaggtcggtgagggttggatcccgggagatcctcgaaacaagataagcgatgcgtgagactcctttggcgatgacaaccatgacaacgacaacgaccacgacaatggtacgatcgtcgacccgactttgctgacccatgtgcatgtgctcgagtcatgcgaggtcgatcagagatttcggatgaattccggttccggatgctaatctgatcgggatcttcggttgatcggaagcaaaatcgagaacaacatcggacatggccgaacagtcatcagtgtgtcgagaccaattgaccaatatgctcagtcgatgaatttcactgaggacccggtcattccttggtggggtcgtgtggtgcgagtggggatgtgcgatatgatgctttgaggaatgccttcgagatctggtgtatcgcacatgtgtctatccgtcgcccgatcaactatcgtcgccgaggctgacgacgagggatagaatgtagctcaaccaaccgacatcaagctagataacgtcggtttgcatgcggtactctacaaccgagcgttatctccgtcacgattcctggccagttttcccgaagctgattgttcgtaactggaacgatggcttttgacaaatgtaccaatcggcccgcctgaaactcgggtggcttgtcaccgagtgccaagcgcaaaacgacgtccgccgaccgagccaacgatagtaagagtcagggagagatggagagataagcagaccttcccatacagatcacaaagttggggatataaagagcaaccacggatgtcgtatattcaacaaatgactacctggatcctacatgcactgctcagcatctccacaacccgctgacaaaatgatccacacactttcgaagctcgccatttccgctgtgtttctcaacacggccctggcctcgcccatcatccccccctcgcctcttgctcgtcgcgacaactggaccccgccggatggtctcaatgtagcatacatgtccgagttcaactcgtgagtcttagcctgttcttcacaatgcctttcgaggtgggtgcagcggctgactaagaggatcgtttccaggtcattgccctccaccatgattttcgctaccgggggaaccattgccggtcgaggcgcttcttcgactgcttcaggggtgtatcaagctggttccatcggtgtagccgctttggtcgacggtatgttcttgcccgagctccgctatcgcaaaccgccgctaaccgtcgcatacctcgggttccgggattacaacagccgtccccgaactcttgaacgtttccaacatctacggcgtccagatcgccaatgtcggtagcccttccattgcaagtcccctttcttcctctgaaatccgaattgggtctgactgaggactgttgtgaaccggtagaactcgactatccagctcgagatggcccattacgccaacaaggttttgtgcgccgacgatagcatctttgattccctagtcatcacgcatggcacgggtaggtgttcaggtgggggttgtatccgatttgcggcttcgagctgatgtcgaagttctattgctatcggtagataccctggaagagacggcgtttttcagtcagtatcccgtctgatccgcccgtagcgcttcggtcgttccacacatgtaaaatttctaatcgcactttggctcctcccacctgcctgtttagtggacttgacggtcaattgtcgcaaacctgtcattatcgtcggggctatgcgtcctgccaccgccctgtccgcggatggacctgccaacctctacgcggcagtcaagaccggagttttcccggatagcaaggatcggggagctctcatcgtcatgaacgatcggatcgggtcagcttggtacactcaaaagacgcatggtgggtgtcgacatcatcatcggaatgtcagtgagaaatatggcgactgaaatagcagctcttccacctcggcccgaacgcagtaaattacctggacaccttcaaagctccggagcccggttacctcggtggattgttcaacaacgaaccattctactactacagtgctgcgaagccaaagtgtgagcgctcctgataggggaacgtctcgaaatgtttgaggcaggggcagatctaatacatccgtctatccgtgctgcggtcagacaaggtcgaattcgacgttagcaacgtgacaagccttcccaaggtggacgttgtctatgggtaagttggtacctctctttgtgagaccgctgagctgacgtgagttggcatgtcatgacgatgctgcccgtagtcaccaggagacggatccgcggatcttcgaatcaatcgtgaaatacggcgatgttaaggggattgtcctcgccagtaagcaataacgtgtaaaaagccgcttcaaataagcacagatctctgactgacatgcccatctatcggacgaaggccccaatggtggtctcggtgtggacgctgccatcacctcgacaattgcgagcggaatcccgatcgtccgccatgttcggatcaatgtaggcatgatcgcgccatcgagcgagccaaatgaagcgggcgtgatcagttcgggtttggtcaacaaccaaaagagccgaatacaattacaattagctttggctaccggagccgaccctaggtctgtattcgaggacactttgagggaggagctgtaccgagcataaacccggaggtggtagctcatattgtagaaatgcgaatgagcccctctattctatatcgacgtggtttggactgtgcggccggtttttatcggaatagactgtgacttggtcgcactatctattgcgtcagcttcaatatctgagtatttttgccatgcgatggaagccttatgtgagaaaggcctgagcggaggcctcgcatttctgagccagagaattcggacgtagaggcgggctactgacaggacacaactggcaggtcatcgaaatcagttcaagaatagatccgccaggagcagatccgacaccgctttcagctggctatcacgagctaatgagctgcacgagaagagccctaagtcagacagaaacaaccgcacatcaaggaacttgtcgctgctgatccgcatctcgagtataattatgatttttgcgacaaacccctacagcccgctttacaatcgtggtcccattcgattcctgtgatcgtccgaaaccgtctatctattcactattatagatataagtcacgccatcgattacatcgcggcaacagctgaaggagcgacattgagttgatcagtcattgccagcttgtctcgctttccaaaccaagactcaccctcgatttcgaccgagattccgcttcataggcaagttcgaccggacagcctcagcgagatgcctgaagaccacgactacagaaattaactcacgtcacgggcaagttgccgacctcgaaagcagctcgagccggcttagggtccgggatcatggccgagtaaacctcgttcatctcggccaggtcgttgatgtctgcatattttggttgcacttcgatcagctgacatccttgattggatccaagatcatgacgcaccttgcaacaacacggtcaccttcaacaccctagaccaatcggtacccgcctccttcaaaatctccccgaccctctggatgcagagcgccgtctcgttcttgatcccaccgggcacgatggtgccatcaaggagaggaacttgtccgctgacaaagactaggtcgccgaatttggtgcctcctgacaaagttttgccgacggttccaagatgggtaatgtcggtgttgcgacgttcgagggctgggggagccgagctgaagggggaggcgctggctacggccaacaacgacgcgaggagaccaaagttgaagagcattgtacgtattggtgataatgattatgaggtattgtggtagaaagttctctggttgatgaatgaaattcactaacgcggatgagtcttagaagacatctgaaacgaacagctttatatgacccggggacccgaaacgttatctcgctcgtgacgagctgcgcgcagttggaaatcaaggtcgctccgttggacctccgttcgacggaaggaacaatccataccaaccaacttgttggccgacacgacccgaggaagagatcgacttggcatcttttcgacgtccccttatcgtgaacatcgatggcgctgcgagccacctgccgaacgttgactcgacgggccgtgtggtgcccgtccaccaagcaatccaatcagcaagtcgaacgtttgaccgtccgaaaccgacttccgggattcggcgcttcggaatagactctcaaccgccgccaccttctcattatctttcggggtcgacggacggctcggtcatttcacctggaccatgcgacttcgaaaccggttcacaagcttcatttttgcttcctcgttctcttggcatcgcgccacaaccttatccgcgcgaacgagatccttatcgataagctcctaccaaaacgcgggggacgttccgtgcgctctcgcagctagtcgaaacatgggatctcaggtactcgttgtggtcgcgaattaacccgccatcatcgtgctatgcgatcgcggatcggcgtccggtgcataggcgagagaagcgaaaagcaagggaatttcgccgacagggtggactttcaacgctgcgaattgcgatggattggaaaacgacgttcggaccgcctttcccgaaggcggactattgagacgtctggtctagatagggtgagataaggtgtcatactcccactgtcttcagtgcagcaagatatcgtcggtctaagtcgcagtggcaagagccgcctgtttccgttcatcgcatgcctatataagtcgctcgggctcgacgatctttctgctcaatgcaaagccctcgtatcgctcccctcaccccaaagcaaacttgattcataatgaaagactctatcctcatctcactcctacccctcctcttggctgggaccgcttcagtccaagcatcgcctgcaccaaaggcttccatcgaattcatcgagtgagtcgaaatccgccgcgagacatttttacctccgacgtcggaaattaaccactgggttgacgtctaattggatagcaatgggcacatccaacgtggcggcgcccataatattcacgtctcttatgaccgaccggaagctctgtccggagatgtcatcctggtgtatggagattgcggtcttgagcatcaatcaaaatcccatcacgaagtaggacgattcagctcgggcaactataagcgagatggaatgccgtaagcatttcccaagcgcgatggactcgcaatagattatggactgacttgctccgaaccgtcgctcagtactcgcttcgtctggctcaccccggaagacgcccttaccggcggttgtctccatgctttcacggatgctggcttggttggtcaatccatcccgctggacgtgcagcacgcaaccttcagcaaacgtaacacgctctcctcgatcaacgacccgtacggcgcgtggttcgatggagttgcctatctcaaagccaaagagcccgaagcctcgttcgtcgcgggaaagaaggatcagaaaattggaatcatcggaggaggaatgtcgggtctcatgtcgggactgttgctggactcggtcggcatccacaactgggagatctcggagagctctcagcgtatcggagggtaagtttcgggctggcgctcgtgtcctccggacagcttactcacgacgcttgcgtctggacagtcgacttcatacagcctacctcaatgggacaaagcctgaagactatcagtaccaggagatggggtatgaaccggtggccttctccctggggtgaaccgttcgactgatcaagcaactttcaggccaatgcgattccccaccagcctcacctacaccgggaccaatgagaccctcgagatccaggatcacaagctcgtattccaactggctgacgaattgaacaagatgaacaaaggaggagacccatcgctacaggtcaactttattccttggatccagaacaacccaaagtgcgtcgatttctggcaagccgcgcgccgaaacttttactgatcaatcagcaagcacagcacataccaatacgtcggaggacttcgcaacccggatggtacggctcctcgacgcagcgaatatgccgcccttgccgctaaggcatcggaaggtcaagaggttgtggaaccctctgccgcccacgaagctgcggaagagcatctcgaagagtatatcggatatgaggacaggtatgctttgtccgctgccaacatcttcaaggcgcacaaagctgcgatcggtcagtccccacgatggaacctcgctgtaaatacaactctcaccgagtgcattcttgctacagagggtggcctgatggacttttccgagtccatgtttctcaaatcccaaggtttgggctggaacgaaacttcagctgtcggcggtaccggtaggtctcgagtcgtcacaactgatcgcactcgcgctgatctcagtgtgtcttgcgtcgaaggaactctgtgggacgaaatttacgacggtgtctatttctcggccacaacctggaaaaccatcgacaagggtctgacccgtttggccgaggctttccaccccatcgtcgacaaaaagatcacttacgggcgccgaatcaacaaactcagctacgatgaatctaccaagaagacctcggtgcattggtttgacaacaccaagtcgtctaccgagactttgacctatgacaagaccattgttgctgttccgttctcggttgctagactttggcgactccccaagatgaaccccgtcatcaccgaagccatcaccggtctaggatactcttatgcctgcaaagtcgctgtaagtgtcattccccggtcagctgctgcgtgattcgcgcttaatagaccgtcaatttcagctcttgtacaagactcgattctgggagcagatcgaggatccgatctttggtggctgcggctcgactgacttgcccggtattggctcggtgtgttaccccgcttacaacatcaacggtaccggtcccggagcgatgctggcgagctacaccactccggttgggccatccctatccgccatgtccgaagctgaccatgttggaatggtcgtcgaagccatgaacgaaatccacggtgacatcgctcgggagcaatacaccggagaatacgaccgtgtttgctggggtctcgaccctcaccaggctggatcttgggcttcgccctacactggccaacacgagcgctacatgcccgagtaccacaagactcactcgaaccatatcttgtgagcattcatggtcacgcgcatcaatcgtctacagggctgacttgtaattcaacccttagtgtcggcgaacacacttctgtcaaccatgcttggatcttctcagcccttgaatcggctacccgaggggtcgtccaactcctgctcgaagacggcctggtcgacgaagccaaagaggttagtcaaaacccaagaaccaacagctcgacctctggactggggctgatctgacttgcctcgatgtttctagatcgttaacaagtggatggcgcgatggatatctgtgtagaatcacaaagcgtacggttcgaactgaatttgggtttttgaaaggtcgacaacgtacgaggcgataattgatagagcgaatcgacaaaacaagggttttgtattgtagaagagagagaaatacacggcatagtaaccctacctacacgccaccatgatcataatcactgcgaattgcttaaaacgacgtatacactataggcgcaaccattgcccagataacaggctaccgcttgcagctttggtgaatgctcacgacaccctaggttccaccgcatccaacgactcatgacgattgttggaaagcaatcattcatcccatacgcgacgaaaacggtcctggatcaccgaaaagttggacccgtggatcttgcatgttccgggccgttgcgctctctgagtcatctgtgatagatggccgtatttatcgtcacttcgaccggtgcaacaaccgcccgcggaaggttgccaggccagactttcgtcacacctgttcaaatctcgtcttccgagtccatcatgtcggcaaattcgtccagttccgggtaatccccaacgagtaccctctctggtcggacaaagacgccccgcatgtgtccgctcgtgaagaatcgttctccgttcacgctacgccatccgacgaagatgagtgaatgcaccatcgacgatcagctgcggatcgcccgagactgcttgatcgtggttctcaccttccatcattcttaccgaccggttcgtccaactcgatgccgatccagtctcccttgccctccccgaacgaggtctcccctacgaaacgtatcgagcccctcttttccaacccgtccggcttgcttgtaggatccgctagaatgatacacctcgacccgaccttttgatccggttttcgtgcgtgcgttgtctgagaggtagaggaaggaggagcgaacctgcccaactgcctcgcttccaggtctttcaggacagtgtctagacgggtcgcaagtgagattacaggcatgagacgtgtatactagagtcagcctgatagcagcggttaccgagtctcgacaagctggcgcacctgatcgtttctcgtattcctcttgcgagatctcatacttttcgacctgggagacgtctgtgaattcacctcccacccgggcattcgggtccgtattctcgacctgtctcacgcaaaaacgttctgcttcaacgctcgttacgccactgagaatttactcacaagggctcggactgaccttgatgcattgccattcttgcactccgtagtagcctaacgtcttgtcttcgtcgtccatgacgagcataggtttgcccatagcttccgccgaatccgcatcttcgtacaggacgagcctttgtgatcgagacgagatcccggtgatgccctcgagcttggcctatacgcaaaaggactaagtctcatgttaccaagtcggccatgggagccgtcgtcccgtcttttgctggagccgttgctcaccttgagagcctggatggtgatttcgggatcgtaacgcctttccccgaacgtgtccgggcttttgatgaatatcttgagcgacattttcgggatagtacgaagagtagcaacgtccgaatataaggtccagctatgagggatctctaaggggcttgtactttggatgtagaagtgaatacgatggccgataatcgttggcgacgaagatcgatgatggtattcccgtcgacggccttgcccgcgacctggtggacaaggtgcaacgatgatgatatggtcgttctctcctatcaacttattgttgtttccagctacaatctcatctctctgatctcaacaggttgcattcacagtagatcagcagaagctctacattagccttgaacgggaaacaagccgaaatagcggctctcctggatccacgatagccgcaagacccactggaggacaatcgttcaaatagtagcggggtgacgcatttcaggtcgacctcccgcctggttctttcctggcaagcctcgatgccgttcgctcctcatcgtaggcatgccatcacatcagttagtctggtctgcacagaacctgttcttgagcgtgtcactgatcttccattggcacttgccactcgtgctcagcttctctcggttgtaggcccgatatgcctctaccaatatcttcttgcaccaaacatcaccgtgttcctcatcaggctcgtaacacagactcgtatgtacttgggcaatgctcgaggggtgattctcgccactcacacttcgtcgcccatcggcctcgcttaactaggctcgtcgacaccacggatagcccacccctcgtcctccctcttgagcttgtcagccggagtgatcggtgccaacctactcgccgtgtttcttcactggctggataacgccgtcgagatggaaaagggtctcatcctggactttgtcgggctgagtgagtctggccttgcgtccgaggcaggaaaccatgaccaaggtcgagctgacagatcgaaaccgtttcgtctgctagaaacccgtccgagtctgacacaggtcctcctcatcgacctctttatggtgttttatcagctctccacgctctacgttgcctacctagcagaccctctaccttatggctcggcggacaagcttctacaaccacctcgcaagacctcgagaagcagctctagacgttcaaggaagacgggtaccgctcggcaggaagatcaagcgggactcgggttaggtctggatatcgagcgtcggagcgaattggaagaggtggatctgggacgggacgaggaagacgagatggatttggatgatgattatgagcgtcaagcattgttgagacaaggtgagttgtacagttcagctggcatgctggcgtgtcgaccttgtcgccgacgacccatccccagctgatctctatggtcactcttacctatccaccgacgcagactcatccctctccgatacgcacctcaatccttactctgccccgcctctgatcttcatcatccctcatctccacacctttttcgggaccatcttcacctacccatcgcccgaggaaccctcgctctcctttgccggggttacaccaacattacgaccacggacgagcggcgagttggatgatgccgagcaaggccaagcacctgctcgaccgcctgcgcctgtacggatacctggcgggctgagcgatcgagggttttggtgatcgatagagggccccggtccgcagagtgtggcacgggaatagcatatttgtatcgcttattggaacatctattgcatcttatcgggaacgaacacgaggacaagaacaaggcagaggggtttcggcgaacgatcgtctgtatggctaacctgtaatctcaagaagacctcttgaccgcttgctagacaaggtctctattcggctcaggcggccttcgatttgacctcgtctgcatgtctcgctattatgcacgaatcggtggtgttgatcagcaacgatccatcgagcagagtcaccggaagactggacggaccttctttattcaactccttgatctgagcaaagccgaacaacagggtcatgacgacgtacttcgtctattcggtggtacgacctgcaattcagccaaacgttgtcgtctaggcgtcgtgtccgtgaacagctctcaccccatccgagagagaacatcggtactttctgcattgtgatactacgtacagactctccaagacgtgctgcagaggttgttcatattcatggtcaatccgcctgatcgctgcgtcatgctagacttccgacttgccagaacgccgatgatccaagcactccctttgacaaagttccttccaatcatgttctcgatcgccgtcctggctccaagagccatcggttgagtcgatacgtgggcatacataaggaatccaacgatcaccaagaaggaagccggaccggggatgaaaggcggtcccgagtatcgggtgattcgagcgttcagtgcacttggtccttttgaagtcatgacgagaagagttgccgctgggttcgagcacgatatcgggcgacgaagtgatactcagtgatcagtgatcagtgatcagtaagtaaatgtatcgagatatttgttggtgtcaacaatgttgcaatgtcatcgagattgttcatgcaaggtggcataggtactgatggtagctgcatccgattcgtaagggtgacgtcgatcgtaaagttgttcaccatcactttggtctgtattcacgggactgttacacggatcaaaggctcgaccaaaatgaatgtgtctgacatggttcaggtctgacccaatgacccattgatccaacgtgttccagcggtttggagttcttccgaggcggcttgctcatcatatggcaattgcaatgcacaccgtcaaagggcctttttttggggagattcatctccctatcgacaatcaggttcttagttgtctttgctgcctacaggctgtcaacatctcgggtaattgggagaaaagaagctctgaatgctttgggcggcgacggagagaccttctgaccgaacctggcgtattccaacgcacgaatgacgatgattcaaataatatgatgatgttcccaccatatagtttataatgctatcgagggggatgaccgaaccctagggcctgatttatcaaacattgccttcacccgataccgcgagcagaattcgacttcttcctccttgtgtcggttgtcaagagctttcctcatcagtagaagccgagatatcgctgtagcattcgacatggactcgctctttacgttccaagaggaacttcggtccgagaccaagaacttgtaccaagagatccgcaagaattcggcccagcacgactcttacaaccggctgcattcgatccagcacgacatctcctttgtccgcgaggtcgccgaggagtggtttgatggcaagttcaaagtcgtcgccaatcagcgttgtgggagttggtataccgacccggaggtgagcaggtcattgacgtcgatctgtcgtcgaaacattgactgacaacggctctcccgactgattcctcggtctcagtaggccccctcgacgagttcgacgacatatgcctactttaaatccaccgatggacacaccaacgcatgggactttagcgtccgtcggtctaaccttggtctgatcggtttcgccgtcgagcagggcggattcatcattgtcgatagcacgaggcgaggaaagcggatgcccgacgcattgtccaagacgattcctgtttggtcagtccggccaggttgttttctaccggcactgtctgtcatactgatcgatcctgcgttcttcgacatgtaggtgtaccgtcatcaaccgagctgtgcttcgattgaacccggaactcgaacagaccgaatggaacacgctgctctatactccaccaaacatcgtctctgcacaggaaaagagccaaatcgaagaccgaatcgaaggctgggtggacaatttggtggtgagcaagaccgcacacgtcgttggccgtctcgaccgacttccgaactgatcattcatacacctggatggtagaactctagcttgacgatccctgccctgtcacgcccgctccgaccgatctttatccatcctgccacgtcctatcctccgactttacctcttcctggttctcccgatgctcccttcattcctatcatctgtctctcggcatcgacattcatcgctcatggaggtccagaacctcggcggggtgcatacgggacgtttgagtacgttcaggggagcggggacgatgacgagctctgggggaaaggattgaaaccgggtcatttcttccctcatcgggaggagatcctgtctgctagccgggaggaactgccggacgtcatccggaggctggtcgatcagggtcaaacggggtcgacctcggccacccaagggttggacgtctggaacgagatccctcggggatcaaagatctggttgggctcgaattcgagtaaactccccctagacttgggctcgtatggcctgatcacgtttgagcaagccgacaagccttcgatcgagaccctgaagagggaggcgatcctgggcccatcggaagagttggtcttgcgacttcaagaaggcaagaagaaaaagaccgatctagattatcctacgcaagttttgcccgccgtcgtcgagtttgcccgacggatacgagcgcaagaccgacccatattcatacgggactggacgggtaaatcgttgagcgtcggtgcagccgtgtgcctcagctggatgtttgtccaagatgatctcgttgcgaggccatcgatcgacgaggcggttcctacgccgagcaaggaagacctgcgtaagcgtctcgagtggatcttgaacgagcgtcaaggtgccaatcccagtcggctcgtgctgaaatccgtcaacgagtacctcatctccgccaagtacaagtagatgttgcttttcagagagggtataatattcaatggatgcgggtttacatgcgacacagagagagaggcggtcgatctatgattgacaagaatgtgattcgagacgctccttatagctcggaaggaatctcgagctgttgcctgacctgatcccggatgatcttctcaaacaacggcgtatcgtccctgaaaaccttgcagcactatcatgacgtcgagtttggggtcagccttgtcattccagaccgcgaaatcgaatcgccgcacgacgcccgaccgacctcgatgttcgccccgctctcaacgttgggctctgccagcatgctgagcacgctcatcaatacgctccgtactccttggacgggggaccaacgttccgaggccttttcgtagtgcaaggggtcatcgcccggggtatggaggatggagatgcagacttccccgttcgagtagactgcgtgacgtggcgaggcggtcagacgtcgtgtgatacgataccctttcacggtgaagcttaccgttcggatgatagactggagggtcaaacaccatcttgaatgggttcaaagggtaatccttgggctgaaggcgaaaagtcggtcaactcggaatcccctggtagctgatcgtgtgacgtcttttgtcctcgtgaattttgtccaacgacttacgaacgtcagtttcgcacaaaacactcctccttcctatcgataccggcaaggaccgtgttcacaaatgcaaagttatcagatcctctcgttcatctgttcaatgtggctggcgggactgtcgtccatcccgagactagactcacatacggcgtcccttcgggaccgacgaccagggcttcccattcgaaaaagtcgtcctcagagaccggtcctgcgacgaacatgctctcctctagtttctctttcgagagatctttgtactctttcacgaggctgctcagacgtcgacgatagagcacggtcagatggggcaacgtcgggacgcaaagcaagtgttggtggtgcgatgcggatgcgacttaccgacggacagccgtcgagctctgtcctctggcgctgtttctaccgctcatcgtacttgcaagaaagcgtgggactgttctgtacgtatgtgtttgattcttgccgtcgttgctgatggtgcggacgggaagcagatacggtcgagggtgatgttagaggggtatatgtgtatatatgcatatgtcaacctggctggatgtcggcggctcggcgtttgccgctactcaagctatcgacgaaatgggcgagtggtcgagtggaacgtatcctgctatatagagcattgagaagagctccccctacgtggcacaaagtgtacatgtggctcggttgtgatctggaggaattatcacgacatagtttctatagaaatgcgctcagtctcgactgagatgcggaggcctagaacatgttgccggataaacgcatctgaagatatcccagaggtcaatcagagaaaatcctaagctgggaacgccggtttccaagaccaaacagagtctaggaagatgtaggcaaggcttggtcaacgtcgagcagaagactactcgtgtcagggatgaacgtatgttgttgggtagttcatcatcagcacatctcactcgacctgggttgcgatcgaggccagcaagcgattgagatcaccttgcatttcgacatctcgacagcatcccctctatgtcctgagcttgtatgcatctgttccaatttgatgaagaaggctgacgacgtctaacataagcagagtaccactgcaaccagtactgattccgaaattcccggttaattccagctcgacctcgagatgctttcgtcatcaaaataacgcaaagttggcaaggtcgacgtcgtcaaaagagacaactacgcaattgacataccatctactaaagctactgcacctattgatgatatcttagcttggcatggcactcttcgccgtctagatgctgtcaaccaagaaacaccgaccgaatccgaacgcaaacgacaccacaaccgccatcaagcaacaagctcttctcacctataaaacgtcatgatcacgatagacctcgcctcactcgaaccttatagcccgtcggtcctgcctatcatcgccttgcccttcatcttgttatacgtacaagcttacctcttgctcaagtatgggagagcaccgggaccacggctggtcagggccgcgttgttacccgttgggatatggagcatcggcaaggcctggctcgggtataggataatgagtaggtcctggccttgtgaccatcatcgttattccacgactgatctcctccatcaccatgttcgacgtagctccagactacaacatcttcaactttgcattcggatgtgcagccgtcttcgtgagtcgacctgaaccctttgacctgccatatcgacctcgacgtcatcagcaacgtactaaacatccttgtctatgcgcgacagtacaccgtcctcctcttctcctactcttttatccctaccggaccccgtcgaacccactcgaccacccccgccctggacgccgcccacctcatctgctcctcccgcctcgtcggttggtcaagcgggacccctctcgctccaaacccttatcctcgcctttccccatccgacggtgaacacaagttcgccgtggatcaactcaaaatggtcgcctaccactacctctggtcggatgcgaccatgtacgcctttcacgggttcgggtacagggggatcggttcccctcggggtggaagcgtccatcaggccgctcaagggtggatcaacatgctcgaacggtggggctgggtcaggcaaggtttgcagttcgagacgggatgggaacgatgggctttggaggtcgggttccgatggtgggtcggcggtgcgatggggttcgcgttttaccagggtgagcgacacgacgtgtctcttttggcctgacgatacctcgagttgtccactgactggaccggactgggctgacggaatgtctgggacgatagcgctctgcttgggataccatgtcatggcgttcatcggggtcacggtgctccgtaatccttcttcggaatggccgaggctcatgaatcagccatggaggtcgacgagcttgttggacttttggggaaagagatggcatcaggtgagtccgcgggattcgaggtcaggcgaaagacatcaagctgaatggcgatattgtcgtgctcctcctattcgtgactattcagatctttcgcgcaagtcggtggcatcgcacaagccattgccagacgctaatgacatcccgccacgattttacttcgcagcaagctttcaccgtgcctacccgcctggtacccaagaagtatcgttcgcttgtcgcgccctttttcgcctttttcatctctgccgccatgcacgaactcggcacgctgaccctcgtcggccatacatcacccgactggagggtcgccaagtcgttcatcaccatggcctgcgggatgacgtgcgagatcctctttcgtcgggtcaccgggaaacgcgttcagggaccggtcggatgggtctggacctggatctactttacgaccgcgacgatgggtctcgtcgatacttggctcagcatgggaattggaggcgggaaaccgatccctacgcccgtcagcctatcggatcagctcgtcgagccgcttcgcaaaagatacctcgaaaagttgatgggttgaacgagacacttcttgacgaccctgattctcctggaagcatcagcatgatccttgctctttatatacatacacggaacgaaatgcaaggatccgtatcatgcctcctgtccaactcgacgatatgcatcataacgcatttcccttaacgatcaatccgcatgtatgttacgaagaacagcattctacagcatctcgatatcgaatcatgacattcgacggaagccgttggcgcgcctagtctttcgacctagtcaccccctgatccccggtaggaaccgtagcaatagcttcttgcgtttcgtccgcctcgtcgacagccaattcgtctcgagtcggctcgattttcgcgtcctgtggcttgatcgagtcgccctccggttgctcaccctcttcgacttcccgctccaccacactgacgttctctccggcccggatgcgcaagatggcttcgcggctcaacttggctgcatcgcacattgagcggaagatcgagtccggcttgtcgaataggacgagcggatggtcaaactcggcgatctgaccggcatccatcaccaacaccttgtcgtaaaatgcctggaaagagatgcaaaggcgtgagcaacctaacctaatcggtgcgagagcaaattctgatacgaacgatagtggctagccgatgagcgatgcacaaaagcgttgtactcgtaaattcttttctgatgcaatcttggatcaccgcatcggtttcagggtcgacgctactcgtagcttcgtctagtagcaagacgtgcgaattcttaacgagcgcccgacagagagcgactgaagggaacccattcagttcggaatggctatgtttcgtcgttcaggtaacttacctaattgtcgttctcctccactgcatcgcatgaacgtgatcgtgcttggtaaacgatgccaaccaagctcttcggcgattactagactcacgagaagttatcaccatcatcgccgacaatcgaatccagctgaaactttttgtaccgttcgatatcagagccaacctgaacctgctccgccgtaggatccaagccacaacgtcgcaggacgtcgttcaactcatggtctgttttgattccagtcggatccaagttctctcgcatcgttccagaaaacagaagcgtatcctgaggtagagctgacagctgggagcgcaacgtgtctagccctatagtccgcaaatcgactccgtcgatctcgatgcgtcccgcggccagctctacaattctaaacagcgcttgagccaaagagctttttcctgcaccggttcctgtgaatcgattacggctcagctcggaatgctgctgcaaagtagcgaaatcaccaggctagtgacatgacttacggcccacgattcctacctgcatgatggatcggtagtcatgtcagtctagtctcgccttcggctccgagcttaacccaccttctctcctggctgagcctcgaaggtaagacccttcagtactaaaggcagatcgggtctatatctcatttgcacgtccttgaaaacgacgtggccatgacggggccaatctgacgggggatcggttggcaagcgagcagccgcttcatgctccaagtcgatgtaatgtaaaacctgcatatatatgtcaatcggaatcagctctctctctctccacagatccagctggatattgatcgcgacatgccctctccgcggtattcatctcctgttccacttggacagcgtaatgcaccatcaaaccgaataccaggaccgtcctaatggcatatgtcaataccaccccgagcttgacaggatcgacttggtttcgcaatccgaccccgaataacccaatcccgagcacaaggacagttcctagactgtcgagccgtaaaacgagccagcgacgcccggcgagtatcacatactctgagcgtatctgccgatccaacgtctcttgcaatttgtggagaaagtgctgctgcaggccgaatgctcggatcgtagatatgccactcaattgctctccgaatgcgctgtacgtgaatgatcgtagtagagagtccagccgtttcgcttcacgcgagctcctgctgaagaatttgccgatggcgacgtagatgattatgagtggtaaaaagatgatgccgaggtacgggtagatgaaaaaaaccaaaaatatcgttcctagaacggcggtgaagttgacaagcacgaaataccattgataggtgaggcgatcatccaatttctcgacatctttggtgagacggtgaatgattcgtccaactggcgtagcgtcgtggaaagatattggcgagcgcagaacactggtcaaagcgctgtcgaacatgatgaacgaggcgcggattccagcgataaacatggagaaacttgcccctagaatgcatagcgcgttaacgccaccgaaggtggcatatagagccatatagtccccttgccggaaacctggaatcgtttgtccgctccaatatcccaaaaagagaacgttaagcacggaactcgcctggcctaatatgagtgctatgacagaaatggtcatccaccattcccggctcatgactcgagcgtatgcaaggtagatcgcccatgtgacactgccggtatttcgctcttcgtccatgatcagcttcccattggagttggcgttgagaactttgccttcttcgagcttctgcgggttttcgacctcgagggccattcctgttccgtttgtaggctcgtcttcgtgatcgtccccgttcccgtattgcgcaattagactctgcatgacgccgggctgtctcaaaagctcggcatacgttccctgctgtactattcgcccttcttccataaccagcaccaaatccgcgcgtggtaagacttccagatgatgagttatgaggacacgactttttgttccgaaagcatcatcgcccaagatgcaattctcgatcagggatgccgaaacgtggctgtcgacagcagccagaggagaatcgagcagcgcgatatccgcgtcgtgatacactgcccgggccagtgcgattcgagccttctgtcctcctgacagatttattcctcgctctgagttggcatttttgccgccattcatcagtcaatgccatttagcgctcgatgcgaagcaaatcgcaaggctcacctccgatttcagtcgccaggccatcttgcaattgctgcaaatccttggttagcgcgcacgtactaatggcccgtctcaatttgtcctcgtcgaaatgtgcgtggcccaaggttatattgtcctgtagcgttgcgttttggatccatgcctgttgcgcgacgtagctcaaggtgcctccgagttcgatttccccgctgatttgccgtaattctccaatgatggcctgcagtagtgcgcttttaccggatccaatccgacctatcacgcacactaaggctcccctggggatagtgacatcgatatcgaccaatgcgaacggtgctctagtcaattcctggggtgtttcagcgttcgtcgcgactggaggcaaaccacgtttcgctctcgacttcgcagcgcgtttggcgactgctttccgctttttttccgctttttcggccttgcgatcctttccgacagtttccgtcttcgaagagtcactaggaggctcggccgactcgtaactgaaattaccatgaattctaactgcacatttcgattgcgggttactgacgatatcccgggggtattcttcggctaggaagatgtcagaaacccggcctaaggcaacccacgcgtcggtcaggttggcgaatgaagctggcagattttgcaaaggagtctggatcacgttgaaaagctgaaatgctgcgaagatgacggcggcttcgagccgatttccgcttagaccatacgtgataaaagtcaagacagccgccaggatcggcaaaaacgtcatggtggcgatgaccagactgtcgaatcaggccgtttcagtacttcgattggccacgcaaccggatgcacggctggtcagacggaccttcggttccaaacattccttttcaacgcaccgagttcttgctccctgacttggatgattcgctcgccaaagaacgcttcgtaagcgtacaacttgatttgacggatagctttgaagatctcgctgagaagcctgagtcgtttatcgatgaacttcatttgcgtttgtcggctcgtgatgagttggttcatcatcgctgtcaatatcggtgaagaagcgaataaaacgcccacaccaaccaatgcgctgtacctcaagttgtagatcagcaacgcgcagccagcgaggatcgcaatcggctcaacaatgacgtcgattatacagtatgtgcccgagtcgagaaacgtggcatcaccagaaacggccgtagtcaaccgcccaggcgtttgcttgacacgcgctcttgtagaaaggcgcatcgatttacgtgcgatctggtcgatcaccgcaatgcggaggtaggaacctgccatgatagagcggtgcccatagaagccgttgaggaggaaggtcgcctgttgcatcgccgccagacctatcgctaggccgaaccctacaccgacatgacgaggtcggcgcatatttaagcgttcagattccgatgcttcgtgccatcgatgagactcggtgacaaagcggatcagttctttgacgacaatcgacatagtgatttgcgtggcccctgagcaggttcgcctcgtaatgatggtcagtcctgcccaacgcaattcaacatttactggccacgagaacactcacgactgaccaacctggctatgaaggcaaggatgatatcggtacggacggtacggaatatggcgtagaacagtctcatagaatgagctcgtgtcgccgctttgtcgtattgctccaccgactcgaactctatggcgcccttctttttcaaaatgggaaagaaccacttccagcgttctactgagggtacaaatgtcttttccgcttcccttatcgatgcgtgtttgggattgggctcgctgattcctgggaggtctacccgagaggtcatgggctgtaatgcgtcactgccattgatttctgcattccgcccggtttcaagctcttgagaattcgtctccttttcggttgacatcttctcatgcgaatccgcactcggaggattcgagcagacctcctctgcggttcgggtatcctggaaagctgcatcgacatgagcgtatagctcatagaagttgtgttcgagaaggtccgacagaaatcgagacagtctgtcgtcttcgagacgccagagatccgtcacctcaagcggtctggagtatccgatctgtaaatttgggtgacgatttgttcagtaggtgcgtgcaccgagtgggttgagagactcacttttaatagcgagaacatccagccaaaagtcagctgagagaaccagttgctcttccgctcgggcgataccgtatcattttgattgagaagaggagcaggtttgggctcatactttaggaacctcatcggtgttgtaattggcgaggcttgaagacgagtttggaagggagaggaagaggggattgacagaagtccgtgataagggcgtgtcagaatcgattgaacgttgctgatcttgatactttcgtcgcgccagtcacggctgtttgccttatatgcatctaccgggcgtgactggcatcgttcgtgacaaaggaaggccgaaaggacctttcggcaaagtatactgttcgtcaccaagccctacctttaccgccgaccgcgacaaaggtagtttgctgacgacagtgaacctggtcctcgttgtcccgtttgacccgagtcacgatagacagccggtctttctgacgagagccggccctttgtacctcgggtccgtcgcaaggacgactgcaaccgagatctgccctctttccaagttcgtcgtccggtcgccacgtaggatccgaggttggccagattctcaaagccggagtctcatatgaactgattctcatcattccgcatacattgaaatgtttaccattacaacctctttgttttagcggcgtccagatgtttcaagatcaggctccgagctgcttcaagatgaaagccacgacctttccatgcgcttcgtccacctcgggcctgcattccgtctctcccggtaccttgagatcgtgatcgacgccttcgatagtgacgaattccacctcttcgttgccggcctttcgtaatgcgtcgaccgtcgatacgctctcggcatacggaactgcatcgtccgccgtcccatggacgtagaagctaggcgggaaggatttggcattttctttcgagctgaaccagatctgagggatgacagagtgatgttcggcagggatgagctgatcggcgtcgatcttcccatctgcggctgtccatgcatccctgatcgatcctttggtgccaacgaggatgtcgacaaagagcccgttgttcttgctccagtcccacacgacatcccttggttccttgttctcccatcctttcagtccaggggtataaggagagtccgagatctctctggattggtaaaggtgctcgatctctttaaacgagtcctcggtggatttcttaggcttgatccagtcgggttggagtacatccccgcccatgccaaagtaggagaccatccccgcacacgtcacgcctgagcgtcttccggctttggccgcctggatcatctcgatagcagcgagcctggctacatatccgcctcccgagaagccggcgacgaggatcttgttcagatcgggtttgacgccttccgggacgtttgccatgtaagcctctgacatgagatagtcgtaaaagttttcgacgtcttggacgatttcatgaccggtcgtggggaccaagagtcgataccctggttgaaccaggatgaacccgttgtccaaaacggcacctgcaagtccgtagtatattcaattccttggctctcggtcgacatatcgttagagtattcacgctttacaggctcaaagatgaactcttcatcccgagaaccgacgatcacaccaccgccgtggtaagcgacgaacaagcccttcggtttgccgtcctgacatttcggcgggtaatagaagttggcgaacagttcgagcccggtcttggtaacggcgtaacggttgacgtgtttgatgatcgaggtcatggtgggtctgcgtcagttttcgccttgtcgttgtctgagactggcgaccagaatgtataagggggatgcagcaggttgtccaggccaatggatggtcaatccatcgtcgaggtatatagccgatcgagcatatggtccgagtcctcgatttctccgaacaattccccgagagaagatggcggcaggtactgggattctccgaaagctttaccgattaccagggtcccttgatcccttgaggcttaacgaggatgatgccagcagtcccaagagtgttcgtagcagctgtgtgattcgacagtgatcttgttgtgtaagctcaacattttgcaggccttcagttccacatcgtcaactggcagccagtcttaccgcttcgcacctcctcgcatacgatacaactgtcgttccaggtctgaccttggccctttcctgcttcttgcctgcaaccctccgatatgactgcgaaccaggacttcgatgagattctctccgagcttctcggccgtacaccgcctccccctctcgaaccgggcaagaccattcactcggccccgctgcagatccagatcaaatcgctcgacgtcgcacccgtggtccaggccgctttgaacttggccaatgatgacatcaaggggtgtcacgatatcgtcgaaaagactcagggagagagcacggccgacgtcttgcatgcgatcttgcaccggagggaaggtgagtcccggtaacaagtcacgatcgcacggttttacccggctgatcatcattgccgaataggtgactactggaactcgaactggcaagttgacacaaacagtcctcctcagccgtcctgtcccctgactgatgacctcgattgaatcccgttcgcctacaggtggtggtcacgtattcaacaccccctctttccctcgactcgcccttgcaagtcgtttgtcaacgcctgcgagaagtccgtaccgggttccaaggaggacgacgagttgcgagagaaacagtgggaagagatgaagagggtcgtccggtgggtagtcgagcataaagcttgaaggcggagcgaggtctgagtgacgagctggtaccggtcgaactgtatccaactactgtatccatcctgagcgatcacacaagacgatgcaggtaccgagctcgcaagaaacaagttaaattacactgataatacagggtatctgtgctacaagataccacgccgcatcacatcaaatctggtcgtaaaaatgtcgtccaactgtgcaccattctgctctcaccactcgtcaacaacgttcaggtcgacataatcaatcacgctacaccgatcgaccctcacgtccgtatcttcttcgtcccctaccggtcgatcgaccgcaacctcacttgtctccatgccagtatacttgcgttcaggtacggccagacgataccattcgcctgcatgggtgacgatgaccagctgcaattcgggcacatagccaggcaaatcgtgtcctcctcccatccccctggtatcccggatagactgccaagcgacgacgtatcgatctcggagtgccaattcgcgcatgctcggtccggtcgaactggacctgcccaggatttgaggtctcgccgccgtctcctcgagcgggagccgaaagagggccgacgatttggtcgcctggaaatacttgggtacggggatgtacggtttcaatagcgagtttagcgcctgtttgggtgtgacgctggggtcgggaccggacgactggcagacgttagccaaccgactgacctcgcaagccgttgctctttgcctcacctttgatttctcctggccgcttcggtttgcgcggccgtcggtttgttcctccccaagacgtccccccaaacatgcactgtccccttgtcgctccagcagaccatccacagctccttgccgagcttcatgtcgtcgtgggcgggacggtagaccaagtcgaccccccagatgacggccttgtcgaccccacgtcggagttccctctcgagcgacccggtagcgacgttccagaccctgaagatcgaccctctctccgaagacgagacgacgtatttcccatctgacgaacaagccagggaggacaacggatgagagtgcgcgttgatgatgggagaacgaaaggcgggatgaggatcggaaggcgagtctgtgctcgtcgtccccggttcgatgacggaagtgagttgtatgagctgtacatgacccgcttgtcgacccgggatggccaacaggcacgatcccacatcggctgacaaggccgcatgacctggacgcgatcccaggagtacatgttagtgaagatgaatgcctgaacgactttgatgtacagcacagacgtaccatccggattatacgccgtcctccattccttcttcttgaccaaccagaaccctcccgcttggctcgttgtcgtgcctcttggcgtgaacgggctcatcccatcgtcttcatccgaactctcaccctcacgtatcggttcgacagcgggcttcgggtgcataccgtattcataccagatgacggactcggagaggacgacgacgatcgtgttcatcctagctctgacggccttgacggcctcgctacacgcaagacgacctttcagcatcgccttttgatctggtctcgatagagggtgtgcgggtttggcttacgggtattcgatactagcgatcaccctcccgacctgccctttcctcttacccggccagtgtccctcggttcggatctcttccccaggctctgtcgtcggtggtacgggcgaagccgggggtagggcagggacaggccatttgtcgtgatagatgacgaccttgttcgggggaaagacgggttccctgccccctccgacgagagctaatagtggggtaaaggggagaggaaccgcgatatcgagagacccgcccaggtctgatgcaggtgccaaaccggtgttctgatcagtaaagggatgggcgacgggaagcggtgatgatcgaatcgactcgcctctttcacaaagcctgactggtccagcttgttcggtcggcctgaccttccggggcggttcctcatctacgccctccttcctcttgcctttatccctcgtcgtgtccctctctgctgtcgttggaggggaaacgggtctcgtcgaattgttccacacggtatatcccttttcgccagctacgacaaagtgaccattcttcctgctctccaaccgtgcctttctttcgatgtccagatccggtctcttcttatcccgcttcctcgtctccctgttggaagaccctgctacaggattcgatgtagctgggcgataattggcaggtaggcctgatgaaaagttgacggacgcataggtcggtcgatacgtctctacgagttgagctcgagcgaggttcatcctggacgtgatcgttggctcgttggggtcatcaggatgaaatcgatctgcaggccaagcaagcaggtgatcactgatcactcgagactgtcagctgtgtcgtagaatgagaacaggagtacaagtcatgatttagttcatatgaacgttgagatgattctcgtcgagagccgaccggacttgagcgagaaaagacgccgaggtcaccttggacaacatatgttcatgcatcgatcaactcgtaatttgatcgtacttgacatagatcagagatcatctacgacacgccagtagaccgtagcacagcgttcataaccccccggatctcttccatacaactcgacgacgatgttccaatcccaaccgctcaacccgacccctttccaaaagacggtcgcctcgaaactccggaatcgaccttttctctatttcggcgtgcccttcctatcgatcgtcgtactagcgagttatgggctacaggggttcaccaagacgaggtacgattatcatgataccaaggttcagacggtgagtctcgagacaggtcggaaaggggaggtgactttgcgactcttgagcgctgatcgggaactcgatcgtcatctgcacatgtgtgtcaaatcacttgctcgccattgcacttgctaccgatagatatccaaggaagacgaactccgaatggacaagggcaggaagaagctcgacctccgtgaagaatactacgtgagcccgcctcaatgacctcgccgcaaatgacacccgctgactttgtcccgacattcgactaaactctcagcgattgcaaaacctgggtataggttcggaagagtacgatattgttcgagtggcccgtccgaagggtgtaccagagtggggtgtggattcgaccgtcaagagtacgagcagcgctgccaacgtcgaacccacagcgaggttggtttgaggtcggaaacgagctgttattcgatttcaccgctcggatattctttttttttcgtgtcaacaccactgtatcctgtatcgtatcctgctcatctacctagtcataccactctgatttcacgagtacctcagctggcatcgttgtccgttggtgattccacatcgatttcaactcacttcccaaccttttctgatgacgtttcgcgacttttgtgactcgctcctcgacctagaaagacctaaagtcgagcaaaacgttgtattttatatacctcgacttctgataacttcacgcattcattacgggttatctttctacggcacttgacgagaaggctcacaagagacagctcgcttagaaccatgtcatacccaagtgagcacatcgtaacacggtgagaacgatacggtaactgaccacgcccatttgctctagagaccaccctggacaccctctcccagccgtcctcgagctatgcgtctctgatcgaccagacctacgctatcatccccgagttcaccctcgaatccggcgagaccctcgtcgacgtccccgtagcttacaagacctgggggaaactgaatgacgacaaggacaatgtcatggtcatctgtcacgccctgacaggcagcgccgacgtcgaggattggtggggacctcttttaggcccggggaaagctttcgacccgacgaggtatttcatcttttgcgccaacgtcatcggatctccctatgggaccgtaagcagtgtgacgttgaacccagagaccggcaagaaatggggacccgagttgacgggaagcagcgtcaaggacgatgtcaggcgagtctcccacgacctcgagcaacgaagcatggttgtgacacgtcctaacccaataacccgcttcgcagactacacaagctcgtgctcgactctctcggtgtcaaacaggtggccgtcgtcatcggaggttcgatgggcgggatgaccacgctcgaatacccgctcaacactcccaagggttacgtccggcatatcatccccctcgccacgtccgcacgacattccgcctggtgcatctcatggggagaagctcagcgtcagagcatctactcggacccggcgtacgacgatgggtattactgttactctgacgaagagggcgaggacgaggacgccgtgcatggcgagaccgaggaggagaggaaacgtcggatcgaggagaggcagccgactcgaggactggcggcggcgaggatggcggcattgttgacgtaccgcagtcgagactcgtttgaatctcgtttcgggcgcaaatacggtgctcctgccaaacgaggacgtggaggtgcactgtcccccggcggagtgaacggcaggagacgtggatctggtgcagggtcgggcacagtgactcctcgtggagaagacaacttgcgggctcataacgacgggcaccgggccaggaaagactctaccgggtcgtccaaagccgggacgcccgtcctcgaaaagactcgagaggttttggatcagctgcaggtacctctcccgaccgtggtggatcagcaggatcagactcgaaccgcagagggccctgggttgaccaacctcgagctcagcatgcccggtggtagcagaagcaggacaccagctcagcaagaaggcaaggtcggtacgggcgcctcgaggcaggtcttttccgctcagagctacctgcgttatcagggagacaaggcgagtcggtttgagcgtttcggttacgctccggtactcatctcacattgacatcgaccggacttgcagttcacttcgaggtttgatgccaactgctacatccacattacccgcaagatggacacgcacgacatctcgttcccctcgtgtttcgactccgaccccgagatcctctcacaccaactgcccctcctcagctcggagcccacagaagaggaacagacttctgcactcgcccacgccttgtccctcttgcccccggccttggtcatgggtatcgaatcggacggccttttcactaccagggagcaacgcgagattgccaaatccattcgcgattccgaactcgtcatcattccctcgccggacgggcacgatgggttcctgctcgaattcgaggcgatcaattcgcacatccagcgatggctgcgtgccaagctacccgaggtgtacgaacgaccgcccttgatcgatgacgaggcgttgaacgaggaaggctttggggtcaagaaggagagcttgtttggcgaggccgaagcggacatcacaaggtggtagatagggcgacaactacatggatctgatgacatgcccaatatgcttttgcctgatttgcgagacggtgaatcggtgggcgggccatctgcgacgaatcgcggccgagttaatctggagcacgacggtccgggcttctgaaagacgagatgaacaaattgaatgggtttctgaactcgtgtgacggtatgccgggtaggagtaagcttgatccagcttgaagcagttggacgttagcccaggcggcaggattcttattcaattgcgacgcaagccggtataccatcgtgatcgtgtcaatccgagtcgcgacgtctcgggctcggacgtttcaacggcgatgttttgggctgattagcgcaagtgttctggctgttgagattcgaatatcgacatgtagtagccgtctcggtgacaggcagtcccccgctcggaatgatgcacgctgtaccatgtctccggctgtttctgagagcccgaagcgctgtactaaggctagcagttgggattttctcgacgagtggtctcaggtggtaatctaaaatgtagagtccagttgtgtttgatgtcgagggaagatgacgcggcaacagatcgatcttagcttgtcctcggtcggacggtctgttccggtcgatatcacacatgacacaggcggtttgtccgtagtcatctagccttttaacttgtaccggtcactcttcagcagtgctactaccctgtagtcattgacagattaccctctcaacatgcctccatacgtctttccaccgacgcagacgagccccgtctcgtactcttcgctcttcaccgaccccactagctcgaggtcacatacggtccacctcaccgactcgacggaacgacgcagccgatttagagatgccctgaaagattacagcaacacgaaaggagatggtgaattgctctcggtggtcgagactgcacagtcgtacctgccgctcttgaccgggctcatcgggagcttggacgaggatgacattctgacaaagtctgaactgggtgagtgaccaaagccagttcatccggcattgcagccattgccaggtagaactgaccacgcactttgatcgctggatctcctagctatcagctggaaatcccccctcaccccgtcgtcgtcatcgatcaacctgtgggcactcgggcacgagctcatctttgtgctcgtcgccctcgctgcgagcctgaacaacctctcccaatccctcatctcagcggcatccacctcgagcgtatcctcttcgagcaagacgcaggtcatgacctcttccatggagaaacgtcagatcgacaacctctcgagcgcggcggatcacttgtgccgagcgtcgggcgttttcgagacgatcgccgaccagttgattcctagctgggaaggtcagctaggggagctcgtcatcggggacgaggtggatgccgagggggatcctgatgtacgaccgataatggggaggaagatgtccaagatgaacccattgaagagcttcaagggagccgggtccgggggtagggccaaggggaagatgccgctcgagtgcgacgtcgaggtgatcagagcgttggccatgtaagtcatattctgctatattcgtatgcctgtcggtggtacacctcgctgaccgcgtacccgtgtcatcctctcgacccgataggatgacactcgccgacgccaacgccatcgccatcctcaaactgttgtcccccttccacccttcgatcacgctacagacgacttccctaccactgcccaagggccacccacctcccgggctactagccaagctcaacctacacgtcgcttcccactactcgggtgcccggagtctcctcaaatcaaacggacaggatatcgaccgtccgctcctggactatctcaagaaggaatccggactcgccgatatccgcgctcgaaagtggttgggcgtcgaagcgggtgagacggcaggaggggacaaggtcggactggctctggcttggctcgaagatgccgggaaacgactccgagagctgcaaatcggtgggcaagttgggggaggcaggacgagcgggttcaaggacaagatgaaggggctcaaattggacgctggcgggagagaagagaggcgggagaggaaggacaggttgggggtggaagaggcggatatcgaggcttttacaaagctgtacaaacatatgaatcagacggtacgtgcggggggttcgatcgtgggctgaacaacggctttttgttgacattaatcacgttccccacaggtacactttcaaccgatccccccggcatcgacattgcagaccctcttgcccctcggtcgacccgtgctggcggcgaaaccgttcaccatgcctcgaccggctttcggacctggatcggtgggctacgtcacgaaaaagacgtcgccagtcatcctggacgacacgagcaaggccggggatggcgaggcgatcgaccaagagagtgatcgggatgcgactggaggattggccatctggggtaggacccaggatacggggacgaaaagggcggattatttctgaattgacgtaacggtttctggatgcatcatcgtgaggttcatgacggagcttgaacgaggctcatagcttaggtagaattggctcgaaagatgatcatgtaatggtgggatgcatgatgtttcggcactacctttgaagaagccagcactactgtccttgcttcagacacttgagctctggcaatcaaactgcatctctggaatcgactgttcatctatcgctagctcgctgaagttgacaatcactcggcatatccatgctcgtgtggtagaggaggagtttcttggtatactgctgaagcaggcttggtctcgaggatacgttcttgtcatgaggctggacactctgccgggtataccagatgaccagctcggacagcttgaccatcttggtgccaacctttcctgctaaccgttcatgcttgatgccttgtgtcccttgcaaccattcgaccatgtaccaagaccacttgctggccacttgtcacttgtcacctgccacctgctactgatttactggagctcctggactgaccaagaccatactaccatctgctatatgggttgatcgatgatagtagtttctatgctcctcccctcccgcgtcatcgacgtccagtgagcgacctatccttgaccttcatatcctcctcttcaactcggccttttccattagaaccctccagggtcctacaatctcgtcgccacactagacaagcacactagtagctagtagtagtcacgccaagatgacgtcgaggctcaaaaagaagctcgaccacatggaagagcagggcaccaacctgaacgaatcattctgcctggttcgtcatacgatctgcgatcgccaacaactgttccgacagctgacgatcgacgaccgaccctcagataggaactccgttaccctcactagctgatacgaaacgggacaagaacgagtttgtccccgtttggaagcaggaggttagggacgaacagggtcgaaggcggtttcacggggcattcacaggcgggttcagtgcaggttattacaataccgtcggctcgaaagaaggtgagtgtgacgcccggcagcacaaatcttgaacggctgatacagaaccgagtatgattctcaggatggacaccgtcgacgttcgtctcgtcccgtggacagcgggcgagcaagacccaagcggtcgaggattttatggatgatgaagatctcgccgatctcaaagacagcagaaagctcgagaacaccgatacgttcaagtctggagatggattcggaacagcagccgagttggggggtcgagctggagaagggtgagccagcgatatgatctccagtgaagcagttcgagacaagacagctgacacgtcgagattcgatctcgtgacagctctctctcctcggctctaagctcgctcatccaaccgtcatcctcgtctatcggtcaaaagctgctcatgaagatgggttggaaacccggtcaaggtgtcggccctcgtctcacggcgagacagctcaaactgcaagaacgcaagatcggtcgacgagccgcccatgtcggcgctcgacagccgggtcaggaagccgagcaggacgacggggacgacgagatggacgaatcgagggacggacagggtaacaagcatacatttgctccgagggataccaagctgctcttgttcgacaacaagcaagatcgatcgggtctgggttacatccgcggaggagggatgaacttgcctcaaacaggtccgtcccgtgctgctgctgcagaacctcaaatcagttcgggctttgggttgggaggccacgacgccgacgaggatgacctcgatatctatgcgtcggggcctagtaatctacgggatgtcgacaatcggaggacagcttatgatcgggacgaagacgacgacatgaaccagggtgtcgtactcctcggcgagggcatggtcggtgccgatcggaacaagagacgtccaggaaacgatcaacggggtactgaagaccctaggaaaaaggccagagcgacagacacggcggggcatacatggcacgatggacgaccggtgatacccggtttcgtggtcgatctcaaggtcgtgtcgaacgacaagtggtgagtcgcccgtcgcgaatcgagctgttacactacactgacctcctatatcgaaatcatgacctcccaggttccccttccccggcattccagaaggatggagacctcgacccgcaagggtctggcagacgaacaggaggtgggatcaggcagcagtgaaaagggaagaaccgatcgtcccgaccggtcggaatcgacctcagatgacggcggacgaggtacgatcttgtcccctatcgaccgaactatcactggtactgacgcccaaaccctcgcagcggggccaaactcttggtgaagaacagctcaagcagccggtcaagtcgatcttcgagtacatgtcgaccaagagcaaagagaggctggcgcagatcataccgggcgggcgacaaggtggcgagtctagcacgcaggagcaagaggtcgaggccgagcctacgaccctacgagacggggtgatggtgccgcctttatcgcccaggacggcctcggccgctttaaaagggttcatcccgttcggtgacgaccctgcgaaacaggaacgatacacgtcgtacctgcgatcgcaaacccacgatactcgggaccccaacccgaaactcctcccggtgaggcatttggaccaggtcaacaaggagttgtctgatttcgccaagtctgcgcaaatgttccgcccgctgagtttcgccatggccaaccgattcacctcgtccaagttgtcggcacaggatatggtccagcccaaacctggtcttcacgtacccgatcccaacaaggtggacgagtggaaggacaagagcaagttggaagaggagatcaaagaggtcttgaccccgcgtgaagaagcggctcgggcaggcatgtggggcaagatgacccgtgtcacctcggattgggtaccccacgccttgttgtgcaagcggttcggcgtggccaatccatggccggacggtccccccgggtccaagcctgccgaatccggagccgccgaaacgcccgtccctgccgcaggtcgagcgttgggtacgaaaccgctcttgagcgctcccggtcaggatgttgcgtggcagagtaatttcgtacatcagacgccagcggaatcggccaaacctgaagaacctcttgttcccggtgagccgcccagggaacgacaacctcggaatatcggcgaggtcggactggccgaggatgcgaatcagggaagggacacgttgacgtatgagaagcccgagatggacattttcaaggccatctttgccagcgatgacgaggatgacgatagcgaggatgacgaggcgacggggcgaacgcggatcgagcgcggaaccgagcccgaggtcgtcactgtaccgacggttgatgctacggctgctcttcggtactctcccgcgccgccagcatcttccaatctgcctatcgcgagcgacgtcgctcgacccgtctttgctcccatggccaaccggggcactggcaaatcggaccccgagctcaagaaatcgtccttgtcgaaaaaggacaagaaacgggatcgagccaaggccaagacgatgctcagtttcgacatgggcgaggatgacgagggtgatgcggatgtcgcggcgggcaaggatgagcgagcgacgagggacaggaaacgacgcaagaaggaggacaagccggtccagcggaaagaggtcaaactcgagccggcggtgagggtgatggaggatgatgaggacgagtgggtggaagcaccgcccattgcccggtgacaacaaccacaacagccgcaacaacgacaacaatgacgacgatttgagactcgacgagatgtatagtagagctctgtgtcgctcagatacggcgggtctttatttgtcgtttcacgggcgcctggatcggtatcgtttgtcacgccgcatgatgccgtcgatgctgacgtggttggcaaaagatagggtccgactgactacgaccttgttcatgatctttggatgcgtgcgtatgggtgtgtgggtatgggtgagggggtgtgtggcttcggtccttgttcttgtcgacctcgttcccaagcgcgccatttcggaacttgtaccgtggtccctgtcaaattcccaggagctggagctggagaaccgccacgagagagatcacgagacgagataccccgcacaacaacaacaacgtaacaacggagataccgaggacgaaactcggcgtctgttcccctgccagctgccagggcctgatcgtcgtaaagccgccgttcggttacccatattcaaagtttttcttgatcggagcatttcctccaggatgaccggccatgacattatcgtcccgccctcgtggtcctcctctgtgtcaaggctaggaacgttacgagacctcttcagatccgtccgaaaaagcatcgtcaagggtctgctagccgctagtctggttccaggatccaggaagatgagtggcagtggccactgaccggaatatcacgcaaaatgccgcaacgatctgggtccacggaataccggaatataccgaggaaataatgactgagatctctcctcgagttcgcatgtcgatcgtccgcttctttttttaccctgaattacctgtgaaccgacctaggcaaaaacagactcttgcacttttgcacctctacacctctggatctattacagtccgacatcgatcgactacaaagatcagatccgttacggatcacgatgcaataacccctacgaacaactgcttcattcgaacccccccacctctccacagagatccggtcgacccctgcccttttcgcgtgtcgaaccaacccatcctagcatgtcgaccctcgaccggatagaggtcaacatcgactgcggcgaagcctttgggcactggcactgcggaccttcggacgaactgttgatgcccttgatcgacgtcgccaatgtcgcctgtggtggacacgctgggaatcccgtcatcatgcgtcggacgatcgctgctgccaaaaagcacgggatcaaggtcggagctcgtgagtaccgagtgcgagcaggagtttttggggaatgtcgaccaacagcggagacaatcaatatgccgatgccgatgccgatgacgacgacgacgacgacgacgacgacgacgacgacgagctgatgcgtttccgatttggtacgacagatcctgggtttccggacaaggtcgggttcggacgacgactcttggcgatgaatccagaacaggcgtatgcagagatgtaggtcggaccgtgtctacccatataacctggaacagatagcatcacgctaagacatcctgtcgacacttgactctctagtctgtatcaggtcggagcgttaaaagtgtttctggacgaggcgggcctacctctgaatcatatcaaacctcatgggatgtgggcaagtctccccggtgatcacgaccgcatactatcgccacgagcgactgaccttcgtcctgcgtctctacagtacatcctgatgcaaacggacgaggcctttaatgacgccacgatgcgagccatcaagcacttcaatgtaccgctgtacggactacccaacacgctccaccagaccggcgcggccaagcatggtatcccctttatccccgaagcctttgtcgacctcaactattccaacgagggtcacctcctcggggtagctcagagcaatcggatgactccggatgatatttaccgtgtgaccaagaccttggggaggacggggatcttgcctagcgtgacgggagacgagttggacattggggtcaaagggcgagctttctcggtctgcattcactcggatttcgaaaagtgcgtagagaacctcgctgcggcacggagagcggtggacgaggtcaatgccgagctgtacgctgggcattcgacatgacgatgagtcgaggcaggaaaagaggtcaggaagggaggggcgacgaggagacggacaatcatatcctttacgaaggttctttgcatagcgtggtgcctggggtcatcacaaagctgggatcgaccccgttaccacgacatattcgctaccatggcttgtagcagtgttcaaaacaccaaacgaacaccaggtctagctcgttggctcctcgaaagaagtgccacgggtgaatcctgcaactgtatgaaaacatgacatgcatcactttcgaatcgcgccaagtgattaacgacctgcgaagctgatcgtcagctacgagtcgacctgttggggttggtcagctgattaatcttcaagagttcatcgccgagttgattcccacggtaggtgtgatgtcgcttggcaattggcaaggaatcacgagcatatgtctcggatgactcctctacactactatagttcactactgggcagcggatcgtccgaaatcgagcgtggcgtggagcacatggcccgaacccaagggtgtggaatccaggtctagccagcatgcatgtaccccggaccacccaccttgacgttggtgttccggagtgatggtgggcatcgtatacgactcgcaatagaaccattcgacacatatgatttgtgctcgttctcgcgatcgccgaacgggcaagtccgtcaagcatgtgagagtgaagtgaattgaattactagcaaacaccatataccctttgccatctcgttacggtctacactctcgatacaacttgacctttcacatcaccgtataccattcggacctgaaagagctacgaggctgtagcgaacgagctcgacccccgaacgaacagcggaccgaactggacagaaatcgggaatcgacgtcgatatcgccagctttggggtcggtccgaggaggtcggcagagtccctgggaacctcgatcatgcctcgcaaccttctcatcccagatggattcactcacatccataaggtcctcatcgccaaccgcggcgagatcgcctgtcggatcatcaagacgtgccgagagctcggtctggcgagtatagccatctattctcctgcggatcggtcgagcttgcacgtcaggctcgccgacgaggcttacttgcttcccggaccggatcagacggcgtacatcgatcaggatgctattctcgagcttgcggagcggtcgggcgcacaggccgttatccctggttacggtgagcatcgagtcggggtctagtaagtgctagtggtgcgagatgctcagccggacatctgcttctatggacggtcctgtacggcgacataggcttcctgtcggagaatgccgggtttgccgaaaaggtcgaaagagccggtctgacatgggtaggaccttcgtcgaaagtgatcaggcagtttgggctgaaacataccgcccgacgactcgccgtcgaagccggggtgagtctccttgctcgagtcggcgatttaggaataaacctaacgagtacgctcttgtaggtcccggtgttgacgggttcgggtctggtcgagacggtcgaggccgccttgcgggctgcagaggatgtcggttaccccgtgagctcctctgaagcttttatttcgttcattcgatgtaccgacaacggctcacacgctcgtccacacagatcatgctcaaagcgaccgcaggtggtgggggtatgggtctccagatctgccacgacccggcccaagtctccagctcgttccagaccgttttcgaccgggggaccaccctcttcgaagacccgggcatgtttgtcgaaaaatacattgccgactctcggcacgtcgaggtacaggtttttggggacgggacgggcggagcggtgcattttggggagagggagtgtagtatacagaggaggcatcaaaaggtggtagaggagtgtccgtcacctttcgtacacggcaaacctggtaagcatgccctcatgaccttggtctctcaaacaagagctgatggtccgctcctaacacacgttgttctagatttgcggagacgactgactgaatgtgcagtatcgctcgccaagagcgtctcttacggtagtgccgggacagtcgagtgagtgaccttcactgccctcaaagcgacgtcagactgaaaacgggtcgggtttcaggttcttggtcgatgactcgaccggcgatttttatttcctcgagatgaagtgggtctgcacttgctggtccctggttgtcggtaacacggctgatcaagtcttccgctggcagtacccgtctgcaagtcgaacatgggatcacagagatgtgctacgacatcgatttggtcagcttgatgctgcaacaagccgagatgcaggctcgtcatggtggtggaatcgactcgacgtcactcctcaggctacagaaggaagggcctcgaggattcgccatcgaagctaggatttacgccgaggttccgtcgcgcaattacgagccatcgcctggtctcttgcagaacgtcgaatggtacgaggcagaagacgttcggatcgacacctgggtcatttcaggtaccaacatttcgtcgttttatgacccgatgatcgccaaaatgatggtctgggacgagaattctcacgacaaggcgaccgataaaatggtcttggcgttgaaaaagagtctcgtccagggatgcccgacaaacattcggttcctctcggcgatcgtcgacagcccggctttccggcaaggcgatacgacgacctcgttcttgacgggaagcgcgtttgactttcggcctgccacgcttgacgtcatctcaagcggagcctatacgacgattcaagattggccggctcgaagagggatcacgtacggtgtacccgaatcgggtccgatggattcggtctcgttcagactggcgaacatcattgtcgggaatcctcaaaccacagagggtctcgaagtcacgcttattggcccggagcttctgttcaatgcgcccggcatcgtcgctgtgacgggcggtgtaatcgatgtttacatcgatggggagcctgtggacatgtacacaaggcttgtggtacccgctggcaaaaagctcaagttgggatacgtgacttctgggtgtcgcgcctacatcgcgatcaaagggggtttgccatcgataccattctacctcggttcaaagagcacgacgtcgacgctaaagatgggaggctatcagggtcgccaactcgtgccgaatgacctcctggaattggatcaggattgtagacgatgggcagaagactttactccgttcagcgtcccggcgtcaattcgcctggaccaattctggcgggacgattggatcctctacgttatgcctggaccacacgatgatctcgaattcattaccgagcaaggtgagtgtccaagcgcaataacacgtacttggccgcgtctgaaaccatgacaatctgctagaccgtgagattctgtatgaaaccaactggaagatttcgcacaacgcgaccaggagcggataccgcttgaagggacctcgcctgcaatgggcacgagtaagcggaggagaaggaggtagtcatccagcgaacgtgatcgacgagccttatccatatgggggtctgaattggaacggagacgagccggttctactgccgatcgtgagtgtggcctaaatttgtcaggcagcatttgagatctgaccgcagcgctttaggacggtccaatggctggtggactcgcgaccacgacgaccatcgtgcgagccgatctctggcggatgggacaatgtcgaccggggaatcggatacagttcaagcgcatcacatggcaatcagcacgggatctgtgctcccggatcgaggcttttcttgacgacattcatcgcttctcgaagggagagctgcaggagaccgaaatctcaccgctggatatcgatttgcccgatggttggggcgacacgattcttcacgagactaacggtgacgaagcgagcgggacggcatcggtcaagtttaggcaggcaagtcgtaaagcaagttgtttgacgcctgtcgttccgttttactgatgggacggattcgcactcgcaggcgggagacagccatattcaagtgacgtacggtcccatgaccgcgtgtgccgtgatgcgatcgcatatacagcaagttatcaatcgcatacatgatattgaaatccccggtctggtctgcgtcacgggtaccacccggggtgagtagagcctttggtcgcatcgtctcgacctttcctgatgcacgttcggccacacagcgtacagcgttcaattcaacgcccacgagatcactcagactgaactcttgcagaccttgatcaacctcgaaaactctctcatcaagtcgcatgacccgctacccagtcgaatcttcaagttccccatcttgctcgaggatcccatttccaaagcggcggtcgccgaatacgccgctactgtaaggagctccgccgtctacttgcctgacaacatggattacatcgccagctcgaacggcgtgagcgatcgacagacggcatccagatcgatcattgcatgtccacagtgagtcgccgggtcagctccccgtccgatgtggtcaggaagattcccactgagacccccttgattgtcagactcgtcaccgagttgagctttctcgcgggcacgcctttatttttgccactggatccgaggtacgtccgtgtatccctcgctgtacggcaaataacgacgtcgagctgagtcgacgggcccgcggtgcaggcttgtctatgttgctcaaaaatacaatcccacacgcatgttcacgcccgaaggtaccgtcggacttggtggacctctgctcgtcagtgagtcgagtatgacaactcgaagctcgaggacgacggccgagactgatcctcctgatactagtctaccctatggaatctcctggcggctatcagttctggggtagatcgctcgctgcatgggatgtgagtgaaaccccggctcctcagcatctctagctcgaactggcctgacctttccctttttccccaggcgtatgccaacaaacccggttttactcgaccttggctgttgcgcgagtttgatcagatccagttttacgaggtcgaccaggctggtttcgaccgatgttatgaagatttcaagacgggtcgattccactttcaagtcgaggagacgactttcgacccggcggcttacaaggtctttctcgactcgatcgccgacgagacgcgtgcgttcatcgtcaagaggaacgcggcgaatctggcttctggggaagaagagacgaggtttttgaagcgttggcatgcggaacaggccgagcgggatcaaggtgctctcagcgtggacgattcgatggggatggccgaggagggtcgagagggagatcacgtccacgtcgtcgcgcccatgacgtcgagcgtgtggaaagtgctcatcgagcccggagaacggatcaagcagggtcagacgttggcgatcttggaagccatgaagatggagatccgtgagtccttgccggttcgtggcgaaaagggccttttactgaatcgacgccgcgacgttgcagcgatccgggcggacgagacgatggatggtctgacggtattcaagctggtcgccaaacccggcagcttgatggatccgggtcagacattgttcatccttgccccggatgtcgtcgacgtctaacggacgatgacaggttgaagacgtacttcgaagaacagggaggccaaacattgcgagggaaatgtacagattgcaacaagaaggaataatggtgtaacaggaagccgaccccgagttggcacgttttgggtctttgtgtacggacgaacgaacgatccaggggtttctctcctctttacatacgcattgtagcgcgacatacattgactgatcatataccccatgaagagagtttgatctcgtcgcgagtcgttggacgggatgatcgacagggcgacggatgagatgtttggcgtcgctcgttagctcgagctcgcggaggctcgcgctcggttccgagaatcctcggccgtccgtcacctacctcgcaaagcgcggacccgaaaacccccttccgtatcgctctttactctgtggttcgcttccattattattggacgaaccgtctgaaagctcggatcggtgcttgccgatcgtttccctgttggtttcgtggaggacggcgggtcgacgctttcctctttgatgtaattcggattcgagagaggcgtaaaggggcgggagtttcccgcttggtcggctctggcaagcgaaacgacgctaacgacggcgacgacggcggttctgatctctcatcatttatacgtccgtttccattcgattcaaataactctctattacagtgtgtgtgagagtggcccgtggcccatggtcgccttggccctctttgtttgatgagccgagaacgagtacatgggtcatagtcatgctccttcttctggaaaactgggcgcccgttcgaatcgagctgactcccccgtgcgagattcgatccatacgatacgattcaaaggtggacatttcccctttcccactcacagtcgtacggtgggtggatggatgagtcgctgagagagtctttcaacgtttctgatcccgggaggggcacggcaatgatctcggcaactacgtttttcgggatcaacagacctcgggcaggggtgcaggcaggcaggtcacaagtacgctagttccgctagtaggttcccgtagatagaggtcgtggtcgtgatcgtggtcgtggcccgaggtgggtcgcacgtactagctcagttttcgttagcgtcaaaggggcggcaatggatgtgaatcgactcgcgactcgcccgtattcgcctattctttgcgatctctgtcccgatattcgacggcaagatagagcgacgagtagcaagcaagtgcaagtagattcgaggacagttgttggagatggtttccatgcgcaactcgagttgtacggtagatggatgttagggtcattgagacgaacgactcggatccgataaagtcacccttagtccagtccagtcctcggctgagatttcccaagtcggtcaccgacgaccatcaacgatatacatacatcgccactactacttgccatcacctctcaacaccactaccactaccaggtcatatcattcacacataatttgaatagttctcgagagaccctatcgacaacacctcgttctgctccgctcgcccatcgtgtgcggtgcccgctccggtatcatggccatccaacccgaccccaattggcctgctcatccgcaataccatcctcaacaacaacaacaacgtcccaacggtccatcacatcacgctgccggatccatgtcttcacatccggttcagcagcagcagcagttcggacatctagctcaaacgcaagggatgcaacaaccgcatcgacaccagcagcagcaacatcctccgccacctccggctcatctcctcaaggggtactcggacgagatgatgttttataatcacaaccacaatcacaacctgaacccgaatgtcgaggtcgacatcaaacctatcccaatgtcacatcccgcttataatcatcacaaccctattgccaatgtcaacactaccactacgagcacgagcaactcgtcgcggggggacagtgccaattccggaccgattcctcatccgtcgtcgacgtcgacgtctgcagcggcgatgacaggaaccacggcgagcacatccgcacagacaatctcgggcggaaacgccgtcgcctctggtagcggatctgggtcaggtgtgaccacgggggacgcgaacaagaaacgccgacacaacgtaggaaaagcttgtgagaactgtcgacgacggtgagtcgctcgtctggtgtataagaaagaaaccgttaagagtcgtggctgaatgattgtccctcgtggtcatttgtgcttgtttgatccataggcgggtcaaatgcgatggagtgcaacctcattgtgggacgtgtaaagtctacaacgtgagtctcgccatttcccccacttcgtctcctctgtcgacccccgctgacgtgacttgaccacgacttccgaccaccgtacgtatacaggacgaatgctcttggaaccctcgggaagactatcgtaaaccgctctcccggcaacaggtcgaggcactgcgcacgagggtggcggatctggagaggatgttacgtgatcatgggctcgatccgggtacggggacggatccgagcgcggtcgagcaggtcgggactgggactggtcttagtcatggcagtcggaacgggagtggacatggcaatgatggcgcaaggggggacgaggcgagggaggaaaaggagatgggggtggacaagaccatgttgcaaggaccagaagatctgagggattggtcacagagtcacctggtacgttgttccacgcccctgctgtcgtcgctcacgtcaagggccgccgactgattcgtgcgttcccgcaggtcgaacacgagtctggcgatttccaggtctacggtccgacctcggcgttccgacacctgggaaaacaacatgccacgtcgggcggcgagacgaagatgttatatgaccccgacttatccccgggcgtcggggcagggccagggtccccgttctggaacgacttcaggaggtacttgcccagagaagtcctgttgaccgaggatcagcacgaggcggctttggataggttcttccggtattacgcaccttggggtgagcataagattcgatctgccaacgcctcgtgtctgtcggcgagactaaatgcgatagtcttacaggtcaacggacacatccgatcttgttccgggaagacatggcgctcgccctttcctccgagacccctatcaagaccccgcattactccccaatgttgcacaacgccatcctcgccatcggattgtgttactgcgacgaacctcatctccggacgcccgcccttagaaaggtgttcgtgacggaagccaagaaacacttggaaaccgagggcatgaacccgtccgttgcgaccgtccaggcgttggcacacttggcttcgggacatagcgtcgacgccgagcataacctgggatggttgtacatcgggatggcactgcggtgtgcactagctcgtgagcgccttggccgggtctctctgagagacgcgaatgacgaggctaataaccatgtcgcacagtcggactgaacatggataatacgcctatgctgaagaacggcaagatcaccgaggttcaggctcgagaggtacgtcggctcggctcgtagggaaagttcgctggtggtccggatctgattcgctttttatctgcagcgtaacgtgacctactggacggcgttcattcaggaaggcctatgggcgccgtacatcggacgaccggtctacgtcccggattgcacgtgagttgttcgagcccacacctcgaactagcggtctcctgacactcgtgtacttgctcgacagaaccccagctccaaccgtggatgagcaactcgacaacctggtctggatcccgcatgatattcccggcaggatcgtcgagctctcactcaagccccagccgggcatggtcagctcgacattcgtcgagaccgtcaagctgatggatatcggtgcaaggatcatgaacacgctgtaagcatgtctggtggatttgggctcgaactcgactaacaatctgtgccacgatgtcaaatagatacggtatcaagacggacattgctacgctgacacgatcaggtgttattagcgagatcaggttagcattcaccggctgccagcttgcccgagttctctgcctgacccccctcgatctcgcatcagtctggcattgagcacttggctcgagaagctgccaccgacgctggtcttaaacagccattctgccaagcacgcgctgccccatatcctgatgatgcacctgagctgggcgtggctggtcatcctcctacatcgacccttttatcgaccattcgcggggcttccaggaaaggactcgaaatcgccaaattcggcaggctataatgcggctcttgcggtcaaggtaggtgttctgatgtctgcgtgcaccgaacaccagtatacacaaagctcactcgatcccaccctctttagcattgtgatcgcgctgcgattcagattgtcgcattactgcagacttggcacaggctgcacgacctacgtttcacgcctccgacggccttgcaatgttgtttcgtagcgggaactactcacttgctgtcgttcgcgacgtcgcgcacggaaaagaagaagacggacgctttgaatcgcgctcaggattgcatcaggttgatgagctacatggctgtcagctggccagcagcccagcaaaagcaaaagtttctggaagacctcctcgtcgagtacggaatgaccgccaactcgcgatctgcaggcaactcgccccccgagtcggcgccgcgacgagaggtgcgaatgcagcctcccgtggtggtcaagactgaaccccagtcgacaccatcggtccaacaagcgtccaactcgaatgtgcagatgcagatgcctgctttcccccagcagcacgacgtgccgatgatgtcaaattacaacaacaacaacaatagcagcaacgccatgacccagaaccccaactatatcgacccgatcctagcggtacagcacatgtccatgtcgtcggacaatccgatcaacatgtttcagtccaccgctcagcagcagtcacagcaacagcaacaaccgcgaccacaatactcggggggcaatatcggacaggctatgagcaggtgagctttcgctaccgttcatttcaacctgccaccgagctgaccgcatcatttcgcagtcaatcgatccttcagcccaaccagccaatgcctgctgccaatcagccctacgtacccatcaacgactttgacatgcagttcggaactttcaactacagcttaccaccttcggacaatcaagctctcgaggcggattgggacccaaacaactttgccatgcccgacgtaccttcacaacgatatactcaagcgctatttgatcacatcatgcagccacatctgcaattgggaatacattcgcagcagccgccggtacggcagtgaagactagagcgtgcgatgaacccctccgcttgtacgattggttagataattcgaggtcaaagccggccaatatgtttgaatatcgaagcacaaagcaccgcgttcggaaaccttgaaggggatagaagagaacgagaactgaatggtctgaacgaggtgaacaaggccgaaccgcgacttgactgcgtggtggtttgtctgagtataccgtcgcgatttgacctcgcgctcatgactccttcggaagtttgcatcttcactatcgactgtgatgaaacgttcaaagacgggtctttcaagctgtgttgcggagtcagggtggttcagggttaatgaggcgcagtcctttgatcacctttcgtgtcagtctattagctaaccgtccagtcgaacgcctcaagaccaatgaattgggactgggcgtcgtgcgaggcagggataactggaaagacggctacgagtcacgcgcttcgaagatctctacatgtcgttttgagttgtagactagcgacaacgacatggctaatgagtccattcaatccgacgccattgcgcgggaagcgaccaggcggtgctccttggagcatctgcccaagaagatagagacaggaatacagacaagatttatagcaggtatgccaaattttccagcgacagtctcctgtcttctgccctgatgaagatgcatggcagctagggatccgagacatgggttggagctggcaagtaaaatattcagtgaattcaaggacagaagcgggtctttggatatagtcagacatgccgatctcgccaatcgtccaaataagagcatatggaaagagaccggacgcataactaccgaagctgtttggaggtctgtcctgaggaattttctgatcccccaacacaccaactggatagagacggtcatgaacaattttggagagcacgaggccacccaaaagaccttgatgagctttgcgaagcaaatcgatcactttggaagggcggtcaccttgctcagggacgcttcgcctgtagcagggaaacatcagaacggaatcaacatggtggtagctccgaactgcactgctatcgtggggcttctaggcaacgcttcatttagattggtccacgggaaactgcaggagggtgagatcgttgcggggttggtaccgatcctagagaagacgacacagatcctaaaggagacgctccaggattttccccagcccactatcaatagcaagtactggcttgacttagatcaatcgtgcattggttccgatatatcgtccgacgaagcgagaagcactgtttccggcgaccacagcgttatgcctctcacggtcccggatatggcaaacttggccctctcagacaagacggatgcctcgttcggaggatcctggtcttcacaggattgcggtcctcttagcctcgcgaaaagtttgggggattatctggcgaacagcatgggaaccaaagcagacaacacggctgttggatcgacgctgccagactggggttccgaaagatcaagtatctctcgctcctcatccgttttctcccgggactctaccggttcgacggaaacagattattcatcaaacaaaatcatgccgcgataggatagccattgcgctgtaatcatcaatctagagaactgccgtctgtctaagagagtgactcacaacgattgcttgaacttcatcactctttgattcagcaatgcctctggcccctcatctgtatgatcgtgggtaggctcgataaagttacatagagaaacgaatagaaagcgacaagatgaccgatgaccacgacattgcggagatcgtggactattctaactcgtctctcctcactcccctcactagatgtagacaatccgcgacgatatctatggggcaagatggtgtatagcgtcgtctcgatccctccgccctgagagtttacaatctaaccagctcggtttttcagccggcgatctacatgcatgaacccaacacggcggactcgccatgacttctcgctcccggcgtgtcagcttgaacgtaccgactcaaaagataagccaatctgtcagacgggagtccgattatgcaggagctgacttcttggtccaaactgattacgctcggtgaatgcgcaacaatactccttgcaagagagccaagacattggtttgatttggatagttgatataaacgcaatgatatgaatgggcatgtggcttcacagtctgacgttctgcactcaagatgatatcattctctgcgctcctacctgtctgaagcacgcgggcgtcattcgctagagcgtcctttgttgagttttgaaatattcatttgactccttaccgtcaaacgaacttgccgctggcggtgcctagtacatataagcagtgtcatccgacagccattttcaggtgacttccttcgcaatttcagcagactctcagtaacagagcatctatagcggtgccgcctatgaatgcacccgacataactgatatatctcatgcttttcacatctgggaagcaagaacttcaacagggaattgaagccatagtggcagctaaatttcgaaccggtacgtcacgtattgacgctttgaaatcctcagtatcgattctcattgatgaatttctcattcaatacctcctgactgtaccagtaggcagtagcttcaaatactgccgccaacaggcatgcactatattcaaaaacgtcaaggccaagaacgagttcatcgacgtgattcaaaaatccgcccaacacgatccgcaagcaggagcatatgcaggaatcatagctactgcggcagtattgagtgccttcgttgagcgaggtttggttcctgcgctgaacagcctggcagacggtcaagaagaacaagcctatgatctggctcgcggcacacgtcaagttctcgcagcggcgcctgttcaaccagcgaatcttagaattatcaaagataaattcggggcactctctccgcgtgcgactggctatacggagggaggttatcgcagccgacgctcacgcaggtcagctccggccgggcggccgattcccgcgatcaaggaactggctttggagttggatgaatacgtgagatccgacttgggtcacgaccttatcaaatctctgcagagctttggaatcgagaggcaggggagtaccttgagctctgcatacgaactctcacagatgtcggggtcgacggcgccgacggtcactgcaaaaccttcgatggttcgcgaccggatctcgtctttggccagcagcctagcaaagattttcgaacaacaggacccaccagtacgtgcctgggaccttgcatcgcgaacctcgtccgttcctagtaatactagtcttcgtctagacatgagggaactcgccgaggaatgtgccaagctgaaaactaaacaaccggtaagggtctcgtctttctccggcagcgatgcgagcacggccaaatcgccgcgatcggacaagtccgcgtcatggtctcggacgagctccctcgcaacgaccgtcgaagattccgcaccttccatcggtcatccagagttgttggcttcaaatagccttgactcaagtcgaagatggatgacggagcaggaaagatatgatgactttgtgtttggcccgaatagttattgttcttggagcggtcgcatatagacggtggcctgcatgacatgatgtggtaccgggagatcattgaagtgagaacagatgatgatgatgatgatgatgatggtgatttgtatgcaacaatggggtggatctgcttgcctcgctgtgcactcgacatcgatgggtgaatttatacgttggtatggtgaaacgtcgattgtcaagcggggccgggggcgacgcgtattcaaagcctgtgatcggcgatcggcgagggagatagtaaccggaacaggacgacgtaactagagatctagatgactaggaaacatccatccattcttgtgtcgcgacggtctgtaccaagttccgattgtgaatgaatagccgatacatagacgccacaatatgccttccaagactccccagatcacgattcatcacctgaacaacagccggagcgaacggttctgtgagcgaccgccgcggctctcggttgttgacatgagcgtctactcacgacgtctgtggccttgtatacccaacctacactgatcagtctggctatgcgaagtgaatttcgactctggttctgaggcatacctcgccgcttcaagctgacctgtgctcgtcgttatttgcgcaggaactcggcattccttacgaggtcaaggtgtggctccgcaaaggtctccgagcccctcccgagctcaaggccatccacccgctcggcaaggcgagtcccgcgtcgaggtgatagtcacgagttcgaagctggtagctgagatgtggacgctctcatacaggccccggtcatgacggatggcgaccttgtcatcgcgcaagtctctcccgtccatcgaccctgcgctgtcgtcgccccgactaacccccaactcttgcgttacgaacccacagtgaaagcggagccatggtcgactatattatcaacacgtactcggccaccccgcccggctactcgctgcatgacaattacttttctcattatgccgagggtagcctgatgttgttcctccagatgggcttgacgtttgtcggatcagcgtccatggcaccatggtacatcaagcccgtgatcgaagcgtttaccagcaaggtcaaggtgcgtcgtcggccgcgtcacatcgggtcgggtcgggtcgggtcggacgtcgaacgccgtgaatgctgatgacttggttgctaccttttcccaccgtctccgtggcgactttcagactggatacgtcgatggacagatcaagacgcactttgagttccgtgagttccgtcggcacgtccttggtgatcgaggcgaggcgcggtcatgctcattgtctttgcctcgacctcgatccacagtcgagcaggagctcggtaaatcacccacgggctggtttggacacaaagaagagcccagcgcagccgatgtgagtccaacaacacgtctcgtacatctcgcagtgggttgacgtcgggactcgccccccgcgtagtacatgctgttgtaccccatcaacgccatcgtctcgggcggtcgtgaccgggtggccgggttgaccatcggtcctcgagttctggactggatgaccagggtacaagctcgaccggcctatcaacgcgggttgaagcggttacaagaggaggaagctcgggccagggctgcgaggtcggacgaggatcagggtgctaccgtgtgagtcgtacggtttcgaggagtgaccagagtctgaccaactcgtcgtcgtgcctcgttcgtctctgcctgtgtcggtgtttgtgatcaatgaagccaggaatcgagttaggagcaagttgtagtgcgacaaggtcgggcggattttacttgatatccatgcgccgtctgattctgataagcgtcctgcatggtgtcgcttgtcgtccccccgcgcgagcagctagcgacgcggcccaaacccccaaaaaccttgaacctgcgggcacgacaaaaagattttcccgctagccgagtcgaacggctgaccgctacatatcatcaagtggttgattactagtgtagcgctctaccactgagctaagagggatttgcttgttaggcacgagttcaccaactgataaacacattttgactcagcaaacaacgattcatctttgttagatgaccgactctcgaccctcgattcggttctctttgttccgaattcgcttcaccgttcttggaccgcctattgttctcgacccgctacgactactctcggtctcgtatatatacttagtagaacttgaccgaatccggcagtcgatgttcttgtactaggaaggtcaagttccaatatcgcattctatttacgcctactgatttgcgacagcaccgcatcttcaagacgtattgtgaagaggttacaacccaggacactcgctaagtagtagacgtctcaccgtttgtactgaacaagctttcggtcctagctacctatagcgacacagcttccttatccgtacatcaacccggattcgtatcatcccaaccgaattcgctcccattagccgaactcggcttccctcctgttgtgactacctacgatccgtaccaacattgcactcagatattcattagacgcgacttagcgaagctccgccgtaacaccctgctgcgtttgcgtgtctttgacactgcttatgtcttaatcacttctccaaagaaaatccgagccggcatctcgtcgatgacaatccgagcctcatttttgatacgacaagcgcggcattgtcggatgagcttgtgagctgctttcgtccgggactagttccccaactgtagggcaacaatcaacaagtcggactagaggttcaatgcgacgtcatgctcggaatcgccctcgtcgctcttgcttatccggttcgtgtacgccgtccaagctgaactggaagcatcgaccttgacctgctctgcagcatcagtggcttgccaaggtcgttcccaatcctctcgagcaagagcagtaagagctgcatatcgaaggaaccggggaaagagtcgcctttggtagctgggattgtggacaacgtagccaggatgcatcttcgtgacaacgaccggctagcccatgaccttgatgatgcgatgcgtgttaacgcgacattgacacctcgctctttggcctcttgcgcttcgtaaacgagggaagccctagacggatcctcattgcagggcgagtgggggttatgagcccggtcgaccgagattacggggatcatgtgatcgtcctcggtatgcgtaattactactcgttacatggccatcatcgacctcaatacccggctgacattcccgcgaaccgtacggctgaccactctggtgcctgtcaacacgagcaacttgccgtatcagccatcgacgagcacgcaaggagggcaggacggtggggaaagggcgggcggtagaggctgcacgtacctgtcctcgagtctcgaattgcaaccagtctcccgtaccgaggggtacgagacccatctgttggcatttgtagattcccaaacccaggctgtcgtcggcaggtccatgtcgacgtccatgccgacgttgacgttgatgaaagggtagatggaaagggacggtatcgggtcagccgatgggtcatcgcattggcaaggccagtcaaggagccgctcgacgtcgatactcacacgagcgcctgacaaccgacgtagacgagcatggcggtgagcaagtctggagtgatcttgccctttcgtgtgggtgtcgtcggatccgtcgtcgttgtcgttgatgtggacgaggccgtcgtagagatctggcggtacggttcgaacgctgacatggtcggatcgagcgggaaggtcagtcagtttccccaggcgtccgtcacaccacgctatcaggacctactcttgaggatttgtgaacacgcgttaaacggactcgtcaacagcgtccagacgatgcccatggagaagatttggatgcccgagccagacatgtagagcatgatcgcttgcatcgggagggatttggccgggctgccgtcgtcgtggtcgatgagaaacaacggtcgaatatgatcagccaggggtgtcaggtatagacgatagacgagggaaacgacccccggatgggtactcacgccaatgccacttcccaggcctttttcaacttgatatcgttggatttggtcgtggctacgagttcgagcgccgagtcgtccagaggggtcgaggtgacggctttcttgcccttctacgcgcggtgtccggtgttgaacgggggagggggtcgatctcggtcagactgaagatacactggtgcgagtgttcacggcggacgtactttggtggacgacgaggtgtatgtcgaaaagggtgcatagcaaggcggatcggcgatcggggtggacctgccggtgtgggcaaatgccgggtgtcagcggtcgtcgggcgtcgaagaggatggcatgaggacgtacttggagatggacatgatcggatcgtggcgatgcaggtgatcgagggttgagtatggtcgggcggggtgattcgttgagagtacagggacgacagcatgatctagccaagccaacatgacgacgaggtcgcggccgtcgttggtgattgtgtgcagcggaagcagaatgacgttgagcatatcgtagcgcccgtttacacatgcatgttcacaaccgacatcagtgtcgggctcaatatcattccctggcactcatcatgcatcatggagagctggtacgtgcgtgtgaagcgaggctatcgtatactacagcagatatattgcaaagtgagggcactggtctcctgtatactgctgaatgcatcgaccagctgggcgcatcgacgagtggtggtgtctctgagagtgaccgaccgaatataacagtcaggagttgaggcgcgcgtgcccatcctgaccgtcagaccgtccgttggaccgtccaacaccggcaggcacgcctgctgaactggaaccccgccgggttgccggttgacgcattgatgggagatggatggaggatttattttccccctattttgaagcggaagtgattgccaacggtgccaccggttccgcccattgcataaacaccctttgtagtaagcgtccttacgggcatctcccgacatctcccgacatctctcactgccacctgacatcgcttggtttcctgtgcagcgggtgaccagcgtgccatcatatacctgtcagttcgtgttgggcatccctctgtgacgtccacgccgctaccgtcgggagctcggtgggtggtccctgacttgaagcgaaaagaggcaagttacgcttcatccttctgttcggctagggctgctggtccgaacgtttcagtcattcagataggccccgccaagaggcgggccgggccgattcccaagatggatgcggacccgtttcgtcaacggtcctgctgatctgacgggttgtaaatggtcttgcgctaaaggtccaaaaagctcctgcaatgaggttgtacctttcgtcttcctggttggattcccgtgtattatcggtcgccggtggcgatggggtactgcgtggagacgagcatccagccggcgcgtacaagagccacgtcctcgaccatgtgcgaccaggactgaggagacgacatgtgcccgccagagcatcacttcgccatcccctcatgtcccgggctgacagaatgattgagcgaatcttccagaatgaatttgtagagcccgtgactgtgagatccggttctctagtatacaattgatatgagtggttgcaggagtcaatgaaggggcatcccacgaaaaaaagcctgccctgagctctcgcgagttcaggaggctgttgattgccgccttcatcaatgggcttgaaagcaatggccagagcggatgagacgagctggtcggtctggagaaatcgagggccaggagtcttcctaatccgatgcacggagtggcaccaacctcggtccgagacacatgtgcacttcgtccgacgctctcttttccatctcgtaaaacatgaaatgatcacaacctcgaacgagcgagagctgtatatgagcgtgccaaggtcaagtcgggaccacgtcttgcctattttcaagaataacgaaaagtcggtgcatggggcacgtcgacttgagtgatgcccccgcctgcggtatttgccaagtgcatccctaccagaagaccacgactgaaacgccaactcggggcacggggtattggcgcgaagacactgcattttgttggtttgttcgatgggccctgaagcgaccatcgttccgatatcagatacaaggtatggtataaaacaaggcgacacattatctgtttcaagctcgcaccctcgcgagctcgaactgaccacgaccgagaaacacgccgacgatccactgtggaccgtcgcgcaagagtcgcccccgcctaccagtccatcttctttttgggaggactggccggcttgacgggcaccttgccaccctttttggcgtaaccgagtccgtccaaccaaggccacgtcgcggtccgtcgtgtctcgaactgttcaatatcgtcacggtgttgcagggtgactgaaagcgggtcgaatgtcagtacgggcagcgcgacgttgaacacgtgcaaccaggcggcagactcacgaccgatatcgtccaacccgttgatgagacagtgacgcctgaaatcgtcgacctggaacgaaatctctcccttgccctcgggtcgaacgacgaccttgcgttcgaggtcgacggtaagttcgtgtccggcgagggcgtcggcgtggagttgctcgagctcggcgggagcgaggacgatgggcagcatgccgttcttgaaacagctgttgggaaagcagggcgagtgtgcgcacacgatcagcaaactgactagcgacacggcgacaccggcgcgaaagctcgacctacttgttgtaaaagatgtcggcaaacgagggagcggcgatgcacctgattccgaaatcgttgatggcccaaggcgcgtgctctctcgaacttccgcacccaaagttggcaccggtacagatcaagatgttggccctcctaaacggttccttgttgaggacgaaatcggggttctcctcctttgtcttttgatcgtatcgatgttcaaagaacgcggccttgcccaacccagtcctctcgagcgtcttgaggaattgtttggggatgatcatatccgtgtcaatgttggcggtggacatgggtgcggcgatcccggtgaggacgttgaacttgggcaatccggccatggcggggtcgacggcctcgggcaggggtttagcctcggggtcgacgaccttggtctccctggggatgggtgccggggacgggatcgcggcgtccatgaaatcaaacacgctcgtgaccttgatctcgggatgatcgctgacgttttcgccgacaaactttcgtacgtcggtgagcctacccgtcatggcggccgcggcgaccatggcggggctcatcagatgggtcctcccaccttgaccctgcctgccctcgaagttcctgttcgacgtcgaagcgcatcgttcctgaggtttgagctgatccgggttcattcccaaacacatggaacaccctgcctctctccagtcaaagcctgcctttttgaagacgacgtcgatcccctcggcctcggcctgttgcttgaccaatcctgatccggggacgaccatggcgtagacgccctcggcgaccttggcgtccttgcccgcggacaagacgaccctcgctgccgacctgagatcctcgatccgtccgttcgtgcaggatcccaagaacgccttgtcgatcttgacctcttccatgacctcgcccggggtcagacccatgtactcgagcgacctcttcatgccgctcttcctgatcgggtcggacgcttgttccgggtcgggtacggtccccgtgatgggtacggtatcctgcgggctggtaccccaggtcaaggtgggcgcgatatcctctgccttgatctcgacctctacgtcgtaatgcgcgcccgggtccgagcggagcgtcttccagtactcgaccgcctgatcccattcggcgtctacggggcacaagggtcgtcctgcgaggtactcgaacgtgatctcgtcgggcgcgatcatgcccgccctcgcgcctccctcgatggacatgttacagatgctcatcctagcctccatcgagagttccctgatcgtactacccgagaattcaatgacgcatccgttccctcctgcggtcccgatgagtccgataatgtggaggacgatgtctttcgaattgcaacccgcgggcagaggaccctcgacgttgatccgcatgtttttcgatttcttctggggcaaggtctgggtggcgaggacgtgttcgacctcggaagttccgattccaaaggccagcgcgccgaacgctccatgggctgcggtgagcgagaacgagtcgacaaggtcagcctcgacgtgttgaccgatgatgtcctctggaaccaacctcgactcactggacgtatgactatccccacaaacgacggtcgtaccggggagagtgaacccctgttcaggtccgatgatatggacgatcccctgcctacgatctcccattccaaagtaagtcaatccgaattccttgacattgtcttcgagcgctccgacttgggcgcgcgagtcgggttcctcgatgaacgagtggatggatttgaatgattttcgggagatggtgctggagggttcccgtcgtcgagcaaaaggcgagacggagagagaagtagtagaagatggttgacgggatagggaatgaaagatgaacggggtcgagatcggcgaatgacggtcagctccacgattcggtctttacaccgcagccatcctggcctggcctctctcttgtactcacgggatattgtgatcgacagtggccagggtacaatccggtctccttacgatcctctttgcgttcctcaacccttcgaaagcttgtggcgaggtgacttcgtgtacgaggtgacgatcaatgtagatcaacgactgtccctcttccgagtagacgaggtggtcgtcatagaccttgtcgtagagcgtgcgtggggtcgacgtcggggcgggcatcgcgggagtgtcgatatgaatatgagtgtgagtgtagattagtttgtggtcgaagaggagtaggggtcgaagtagggatgtatgacaagtatatgggtaggtcgtgcaccacatggtccccctcttgaatctcttgtatatgtttcgaatctcattcgttcgccacccgatcacccgaaagttgaatggttcggccgaaagtggagcggcgaatcggaggatgacgtgtctataagccgatggtgcccaacccgaaatgatagttttttgataacaagtttcgggcgaaaagattaaattgataatattggcggagaggtgtgacgtgtcgattcggaagtaatttgtcatccgcctccggcctcgcttcggaagctaatcgtcattcatccacctcatcatcatcactcgaatcgtcattcaactcatcaaccaacgtcgacgtcgacgtcttcaaaggtcattgcaacaacttccagcactctactacccctatcgtagaccccacccttgacacaccccatcatccaccatgagcagattcgttcgaccaagcaagtaccgtcatacctactcgcaacaggcgaaaaaggagaacaactatgagaacctaaaggtaacgtctcgccgtctcacccaccccggggtccgtgtccgtccccgctcgttttgcgtcgactgaccctttctatccaccgctcgccttgttttaggtctcgacttcggcttgggataccgatctcatcaaagccaaccccaagttcctctctatcaactaccaagcctcgggcgggggagccttctgcgtcctccctctcctctcccccttcccctcgtcccaaccggcgatccctacccctaaactccccgatctcctccctctgtgcaggggtcactcggctcccgtgctcgataccgcctggcacccgcacgccgaagccgtactcgccagttcaggcgaagatggcaagatcctgctctggaactttgacgccgagctctcctcctctggccgtgggaccgagtcttacgggggcaagttttccggatggggcgaggacaattggacgacgccttcggatttcgaacacgtcgcgctcatcgggaaagcgggtaatggtagaaaagtcggtcaggtcgtcttcaaccccgtggccagcgggctcctcgccagcgcttccggggatcacgtcgtcagactatgggacgtcgattctagatcgggtaaagggttcgatgcgccgttgatcgagctcaaggggcataaggatacgatccagagcgtctgttggaactacaccggggatctgctcattaccgtcagtccgagccgtcatgtcatcggcgtcatcgtatcgtcgtttctaaccccctccgcctctgcataccccgtgtcaccctgtcaacatcgtccacttgcctcctaaactcgcattccgtgcatcttttcacctcacctcgactcggcttgacggcgacgcccccgatgatagacctcgcgggacaagcagatcaggatgtacgaccctcgagcgggttcagagcctatcaagcaggccgacgggcatggtgggatcaaggggtccagggtcgtctggttgggcgatcgggatagggccgtgacgaccggggtgagtcgcgcattcgacttcgagccggcgtggggtgagaaccgcgggagactcatagggtgacatcgatacgcgatagttctcgagaatgtcggacagacagatgatcctctgggataccaccaccttgacgtccatctcgaccgagacgatcgatagcagctcgtacgtcctgtcgcaatctcgccgtgtatctctctcgtccggctcgattgactgaacactgaacgaacgcgcttgtccgatcttttgacatctcgtcgttggtgggtgggcgtgaacaggggtgtgatcatgccgcattacgtcgagggcaattcggtgctcttgttggccggaaaagggtgggttctcgggccgttggaaatgagtatgaagcacggtgtgctaacgcatactacgggtctccttgtatcgcagagatggtaacatcaggcgagtcgcgattggaacgccatgggatcgtccgacctgatgctaacccgctcgaaccggtacagatactttgaatacgccgacgacgagctgttctacctgaacgaacacaagagttccgacccccgtacgtaaaaccttgcccgtccggtccggctcgtacctacgtgccgcctttgctgacgccggaagacatgcggtgacagagcgaggattcaccctcttgccccgacacgccgtcgatgttgggcaaaacgaaattgctcgcggtttcaagctcacgacgagtaccgtcgagccgatcgggttcgtcgtcccgcgcaaggtcagtatcgcgccccacctatctcccgatggacctctccttgcttgacagtggagctgatgtttcaattgtggtgacacacacaggccgagagcttccaggccgacatcttcccccccgcaccttcggacgaggccgcgttcaccgctcaagaatggatggacggcaaaaagggacctcccaagttgatcgacttggagtcgagggccaagacagcttaccaagctcccgctcagagcgaaaagaaggatacccccgttgaaaaaaaggaaactgccgtcgagaagaaagaaagtcccgccgagactccggctcgatcgggatcgcttcccgtaccggccacgaccgataccgtcgagtaccccaaggacgctcccctcaagtccgcgatcgaggttccggagacgaccaagtcgtcgaccgagtttgacccgagaaacctcgagatcaagcaggacgacccggagagcgatgacgaggagctcaccgaggccaaaaagagggcgcccgttgatgacgacgatttcgaggacgaggccaaaccgtccattgtcgatgtcagtgggaacgaggacaagaaaaaggacgagacgcccaaggcagaatctcccgctgcttcttccccggccatcgcctccgtcccgggcgacaagacgcccatcactggccagaactcgagcgatgtgagtgccatctgaacgggactcgatcgatcgtgtgttcacccgctgactacgatgtttggcacaggacaagaccatctcggaactccgcgccaagctggccgaggcggaacgtcagctccagtctgttcagctcgaaaataataacttgaagtctcaactgaccaaggccaagagtctggccaagcagttggccgatctgtagaggcggaaaggagaagaagcgtcgcgagcgtgtccggcgtggtgttggtgtgtcgcgtttcggtatttgtttcttgtttcgttgtagattgcatccgaaagtgtttcatcacaggatcgcatggcttaatattctattaccaaggcgccacagcttgaacgctagcttgtgactgggacgtgacacgtcggggacgttgctgcatgctgatgactgacgagagctgtagattcgatgaacgtcggtcaacgggcccaagccgccagtgccgcttgggtcggctgtgatacttgtagggttgttctgcaccagtccgtatggctcctgcgtcctctctgggattgctgtcagtgttttgcaaagcccctggtggggagctgatacctagcccctgcgcggaagctaggctcgcatctcccatcaccggaatggattcgtactatctgtgtgatcgtcaccagtgcaggctagggttagagcccaaaaaaacgtttcgcgtgatacaacttgatgatagaggattcatcactcgaaatatgtgcgagagacattacatacaacaatttgcgaacgcaaaacgagttgtaagtacaaagcatagtcctccagctacggcggcctgtcttgccagacttcaagccaaagagttgatatagatcaacgttagcagcctccttatgtgtgaactgccttgataagtgaaaaggagccctcgggggtatgaagtccagcggtagagtgtagagcccctattgatcggtacaatcccagcggtatagggcgggagaaggggaagaagccatgatcaaggcgtgaggagtatgagactagattcgtaccggccaagagccggtgtatgtactactgtgcgttcatgtgtgcatgtgtgagtcactcgtcagtaattgaatagctaatgaacatccgttcaataaataattgttgtcgtcgtccctagaagggtacatgtgggcccaggaagcgcaaaggctgcaggactgaatgatggtccgatactgagtgaacaaccgagacgcctaccggaacagtgaggtgatatccggcctataatgaaccgacggagagacatgctcgtgggcctctctctgggcgtcataactataggtctttctgagcgtacaacgagcaacccgaattctgtgcattcctaccaatcgtcgtcgacgcctagcccgacctttttccaaccttccggctcgctgtcccagtcgtcatctccctcgcttccttcgtcttccctgccataatcgtccacctccccgtcctctttttcgccctcgaaaccttcccccgcggcgtaaatctcgatgcctctccgcttcaagcgcaggtcgttggcggctttggtagagaagatggccatggctttgcgttcgtggtacgccatcgtttttctcaaaacgtcgttctctggcgagcgaatcgatagacgggacagcccttccgcctcgtctcggttctcatcgtcttcctcgtcgaaagcttcgggattccgtacgacggtcttgactttgcttccaatgctcgcgctcgaggtcgttcgctcgaattgcctgccaccatttcgtaaatcgcgcgcctcgatgttcccacccgccgcggcgattcgacgttgttgatccaatctgtacggctcgatcttgaccttggtcgtccgtctcttgggcgccgtatcgaggaccatcccgttgggctggccgggcacctcggaatcgagatcggggtcgctatccgaccactcgatctcccgaacgagatcctcctcgacgcgtatccggtcctggtgtctaggtgagctgtcgatgacgggtaccgcttccgagtccaacagcgacgcctcgtcctgcttgtcgagctgagcgaggagggccaaccttttgcccttgagcggtgtcgactgactggccgaccgagggctctgagcgaccgatccgatcggcttgctaggcgtactcggcggtccaacgtcttgtgagccattcgttgtcttgcctccaagctcccggtcattcgtagggttcttcccagcacccttcaccgattctggcactcgctcgatcttgcgcttcttgaacatcttgcccaccccacctgaactcgtttcgttcccttcgagattcttcttcttcttcttgtcccgcatgcctagctcgaactcgtcatccagatcgtcttccctcccgaaaagggtcttgaaatcgccctttctctgcccatccgactttttcggtgtaggtccaaacacctcgtcttcgtcctcgtccccgtcctcctcatcctcgtcgtcctctctcaggggatccgagccgaagaacccactccccggcttccgatccagtctcctcacgccttttggcgtatcctcgacctcttcccctcttaaacgtttcctcgccttggtcgtcggtgtgatacccccattccaccctgaccctgaccccgacggtcccgcggtaggagaacctgcaagtcggtcgactctcgaggaggatgaaggggacctcgagagcgagttggcttccaacagggatttcaacctggacggactcggggcgaacaagaacccctcggcggcggcggaggtggtattacccgagtcaccgacgtcgggtcctgcttgtcgagctcgagactttcccggcgtcctcatcaagtccgagacgggcgtcgctctgacctgggaagctccttgtctgggcttggaggggctcgcaaacgggtccgggaacgaaggatcgggcacgctaggtccatacggccgattaccccgtccacccgtcgacctcgatctcgatcccgaagccgaagccgaagccgagcccgacaccgccgtgggcgacaagaacggattatccctatcatcctgtacgggtgtcgctgctttccccctcgcactcgatcctcgtctgactacgggcgtggtagcggtcgtttccaaaaagggattcgactgatcgtctggtacgggcgttgaaaccgagatctgggtggatatgctggataccgatcggaagaacgatcgggtgctcgatgtgggcgtcttatctaggggtcgagcgggtggacgggcaggtacaggttgcagcgttgtgggttgagaggacgatgacgaagagatgtctttcgacttggacaaactcttgtagagcttgtatttcagggctagcgaacgatcaccgtcggcaaaggtcgacctatactgcgaccaagcctactcactgatctcggggacggccttgatatcatcccgactcgggtccctgccattctccgatctaaacgttctctcccacgtcttgatctctgctcggacctgagcgagctcgtcctgtagcgacattgctccggcggcgtccgatttgatctacaggcagactttttactcgtcggtcccagtcgctttcttgaccttgcgagtatatcttgcgggtgtacagatcgacacgacgatgatgctattcgattccaggttgatgttgggttgttgtctcgctacttgtttacgattaccgaggtcgatcctggcctcgtatgagtcggatatccgagagactttggcagcaacgaaccagtccgagttgctgttctatattctcccgagtctgcgcagctgtgatctcttgaatctgacctatctgtagagctgcagagtggtgtatggcatggtcgggtggtctatatgatgaatttctataaatctcgtttgaattcgacttttggacgcgggtgattgcgagaaaaagtcgaattcgatgaaaaggtcgatcgatcaacccatacatcatctcgtcttcatccatccatccatccgtatcacctacgccctgcacatcaacaattaaatcctcctggctagctggactaccaagatgacctcatcaggaccccttgcaaaccaggccagatcggtctaccgccttctcattcgagcctccaactcgacgtttgcaggcgagtctccgcctcgacgtgcgatcgaactttcgatagctgagctgacgtctgtccgttctactccatcgcaggcgacgtcgcatcacagcatcaattccgttccgtcatccggacgacctttctctcgccgacgttgacctcgccgatcaaatcatcgaatacggcacctccccctacatcctgctccccatcctccagctcgtcgtcctcgtcctcgtcctcgtcctcgtcaacaacaggcgccacccccatcccacctcccactcccactcccgccgcgggacctacctcgctgaccgaacccgagtatttggagaaactacaacactggcgagacgtcgccaagatcctcagggagaatatcgtccaaggagaaaagatcgagcgggaacgtgcccagttgcgtcaggcccgggaagatgaggacgaggcgagggttcgagcgggatcgatctcgaacgagacggcgggggtggaggaagaggaagacgctcctatctaccgtgagctcctgacctctttcgccccggatcagtatcagtccgatcgataacctccctactaacccccctattccccctcgcctttcacgcatgcccccctgacttaacaggcctccgattgacgccccacaccgaactcggggataacgagagtatcaagctcaagacgcctcccaagctcgagtcgacgccctttccgaaccggaacaacgaggctcgggagaagaggcgtcgggagcgggaaaagaggatcagggagagggaggagcaggagtgagggttaggcggtgggggtctcccaggcggaggtagggtcgtgggacaggagaataggacgagtgggtggtgagggtcgaccggatgtatcagcgtcgaacgcaggaggtcataggagatggtcacggctgcatctgatctcgaggcggagcaggcgtgcaacaggaagcacgacctcgggccgatggaatcacgtcgaccctgaggtcaaatcgctatccccccatgtcatgtcatgccatgccgtgcgatgcgatgccatgtcatgtcaaacgagatgaaatgaaacgaacagaatacagcaaacagacctctcgagctgcactcttcgcgcgggtcttcgtaatcgctggacgatggattcgtcgccgtcagactcggaatgcgagagtgacagatctcccgcgctacgacgaaaagcgatacgcatctgtttgttccaaacggaatgctacgtttttcgtcggatgggaccagaagtcgttgcaaggacagatcgaaacctgaatctatcgcagggtcatggtccaggcaataacagagacgatggacgggttgtacatgggctgtcgatacgatcgagaggatcgcgcatgatgcggaaggtatgtgggaggagaaccgatgagacaccggtcgtagcgcccatcagtagcaggtaggatcgcgcaggacagtaacagagtatgactttgtgagcggtcccacctgcgcctcgttgtgcttttgatggatggatgctctcttacgtcgacgatgacgacgaggttagtcatcgtccgtcgttccatttcattcgatccatcgcgaaatttggccaccacagacaatcacccttgtgccacatgccaccccgctttgcctcctggaattgtcttggggtcaggatggatgtctcttttgtgttggttgttgtctctatatctctatggaacaagtgtcattccatccatctatacactacactacttactctgtgtgtgatggtctgtctctattttcgtatccgcggttcactaatcattttacgtcatcccatcctcggccggccgggtagtggccatgctatttcgttccctgcagccatcaacctgcatcagccatctgatccgacgtcgtcatctagctatctatctatctagacaacctaagcattcaaccatcgacacccatacactcgcacaatagcagtagtcgtaccgaacaatcaacattatcaactcacatacaaacaagcaagcaacctcataatgtcttggttcaggtgagtcccgataagacatcgacccggtcactcacccttcatcgccatcgagctaaaacttgccatccgtaccacgcccacgtcgtgtatcttcgcctcgattcgacccagctcgagtaaacctgccaacacgacctcgtccggggaacccaacttttggcccgtctcttccctccagacagggtacggcgaattgtccgacaaggataccgccgtgagtcgagacctctcctctcctctgccacttccacgtcgccccgtcatacagtctacttacgttctcctatgacattctcccatgctcctgtctcttatacccaactgaggtaatcggggcgaaagaaggggagggggggcgaatttgtgtggagggtttaagacctgcgaatcagacacacagacgatcagcttggatgtcgctttggggtacgaggtctgccttgcgtgtatccgactcacatcttgtactgcaagctgtccttggaagggtgttgacccttgacctcgtactcgattccgaggtcgagatctcgggggttcctagcgttggccttgcacgaaaagacaccggtgatcttgtcgccctcctgtgaatagacggcatcgacgtcagtttcccgattcgcccagtcgaggaaaagaaagaaagacgacagtgaactcacgttgacggcgatggtgtcctgggtgtacatgacggtctgcttccaatgtgtgtactacgaacacgtccgattgtcatcagtcgcctgcacattcctcgctcggggctttgtgacaagcaatggggagtgtggactcaccttggcgtggggtccagtgctgaacgagattcgcttgtgacaagcgttgaagtgggtatcgaaccaacccaaaaaggcgtggacgtctgcgagaatcggagggggatacagttctgagcgcccagtcttgatagatcaaataagaggagtgatttcgtaaactcacagtcctgtcgggtagcctccaattcaaagggagcggtaaagtcgagatcctcgatcttgaccgtcttcaagtcgatgtcctacgaatcgtcatcggtgaaggcacggacacggaagagaaacacggcgatcagtcttcgctcgcgggcatcgtcacaagcggaaatgcatgccaagactcaccttgatgagacaaggcttggtgacgacgctcttcaactcgacgcagtctaccaggggttccttcaagacgataggcaacatggggctgtagtcgaacccgtagacgtcgttccagactgaaatcgcatcgcattgaatcagcaatcaaaacgtaaggggaggggcggggggacgacgactcacatccgatcttctcctccttgtagtcggcatcctcgatagcggccaagtacatggtacactggtccgggaacagcaatccgtcctttttctacacaaactcgcacgggtccaaccaagacgtcgttcgtggttagcgactcatcccgtccctcgcttcatacatgggccaaggaggaagatgaggatgttggtacgggactcacgaggtatcgatcacgcgcgtaaagtaccgagttggtcatcgactcgaagatgagcaagtatcccatgaactacgacgacgaggacggggagaggatcagtaccgatttcgctagcgagacgcaatcagcggtaaaaggcacggcaacactcacttctgatacgataatgtcgacctccttgacgggaagctcaatctcctcgatctttcccttgataagcgtgatctctatacacacgagccagagagtttgtttaattctcaaccccgatcccgaccttgaccttcgaccttttccaccgacgaacacgcccgcgacggggacttactatcagcgaacccgttcttctctacgatcttctgcgcctgatccaggatattactcatatccacgccgataaccatcttggcgcctgcctttgcgcagaacatggacaagataccagtcccgcatccgacatcgaggacgaccttgtccttgaacaggtgagggttttggaggatggcattgcggtaagagagggttcggacggtatccttgagcatctcttcgtggatacctgtgcacagagttagatgttcggggtggaatgacggtcagtttgacgggcaagtagggaaatgatgttgagacgtaccgaaatgagcatacgagtcggcgtagctaccgagacatcaagaaaacacagcaagagaggtagaaatgatgagcgaccgagtcgagtgtgataccgtgggccaacgaaagactcactagtccttgctggtcatggccgaaacctcgacgccgtcggttccctgagtagggggaggcatggtggaagcggtagaagaggtggcgggggcgtcgacttgcatgtgggccattttttagatgtagggtagtgtgtgagagtggggtgaggtcgtggtggtgatggtggtaggttgagagagaggagaaatgtatgatagacttgaatctaactttcgctggagtgtgctgggtgggtcctgttgaaataattgcaaaggcctgagcgcaagcaaagtcgatttgctcccgagaaagtgagaacggataacgtaatcacagcatgggtagagattaaattgataacattcctctcgaacagcatgataaccagtaatgacgcaaaatgacgtgtaatttcatttgaattacgtcactcgactattgtatatttctgtttaatcgaccggtagctatagctaatagatctcgatagatcgatgcatggggaccggaccatcccactcaaaagtcgggtcaagaagcaagaagcaggcagtcagctttgacaaacaactctacctcacgggcgctggtcggatctcttgcggaaacagacatttctcaacatgtcggacgaagaagagatgatgaataacgaccaacccgtcacaacgacgacgacgaccaccaaaacgacctctgaatcgcccatcagcaaggccatggccgctcacctcgaatctctcatgcaaggcgacgaagccgacgatcaagacctggccctagcacccgtgctcgatttaggcccagaggctgatgaagaagactttctcgataacgattacacgatggatggtgacggtcaggaggacgagggggagtacggcgacatctacgccgacgccgaggtcgaggtcgaacccacgctcgaaccgatagatatccccatcatctttagcacgagtaaatccggcggagcatgggacgaccgggatctcgtcacagcgttcgatgccgccaaggaggagttccacttgcataaccccggaccgggcagttggttggacaagaccaccgcggcgctggccaaaggcaaacccctcgtcggtgcccaatacggggaaaccaagtcagtatcgaaacccttgcattcccctctctctcccttgaacccatcatccccgagtctcatcccgtatcatcctcgttgaatctgacgcttgacgtttgacgttattgacgcccagtttgatcaaaactaggtggtacacgtcgtacgacccgaccgaggaccccatcgtgccccgttcggcacacgcgtcgtcctcaaacgccgcccaggggtcgaacaggaaggagacgacggggaaagggggtaaacaggcaaagaagcggaaacgaggtggagagcaggggacgaccacgggtgtgggtggggcgggggaaggtgagtttaccggccgatgcgagtcggagtcggggatcgtccggctgacccgaaaaggcacggaaatgttgctatgctgcagtccctcggtatcaacctcgacaagaccagaattcccaaggaaaacgagtccggatcgatcatgccccgatggtcaacccctacctttccgcgacgaccccggcctacccgaatccttacctggacgcgtcttcctctactcaagggtacagacccgtagtcccggactatcgaccgacttccccggtttatacgcctctttcgcccaactttcaggagaccagacttgcggacgggcaagatgttgggatggactccgatgcgttcggtcggtcgatccccaccgcagcagcagtgacgggaggatcgggctcggggatgctgggtccgattatcccggatgatgctcggtacgaagccatggacagaggggttggtgggaggaggttacccaattatgccgggttggcgtctccctcggcctctccccctgctaatagacagggaggaccgcgtgatcaacctcaatatcaagctcgagcctctctagcgggtcaacagactcgaccatcgaacccgtaccacccgtcctcgcaaccacaatcacaggcaccggtccctcaacctcaagcacaggctcgtcctcggggtcctctacaggatccgacatacgaacctacaggctccggcgtttacccttccatgggcacgtctgggttctcgagcggcgtagagatgaatcgggaagtcgccgtctcccgggcggttaacgcgcagtggtgggccgggtattggttcgccatgagcgaggtgagtcgagcatcgtgtgggatcgtgtctcgaagcgatcaggtggctgatttttttcatgtggggtattcgctcattatcaggtgctaccgcccgccgaaggacaatgagcaaaagggagagctggcccatctatagatcatgcagcggtccctaaaatacaacgtcgaccgcgatcatacaacttgtctaatttacgcatagatgctattcataccatgcattgtgtcattacttgaagtccagctatatggacgcacatcgcattcagcagtcgcctcgcctggaaaaccgaacggtcgacttactcggatgaggaagaggaggatattacttagaatgtgcacggatgtccagcctgcgagatcgtccggggtagatgtcagcgatagcaggcaaggcgttataacgccttctaattaccgcatgccaccgctggagatagcgggatgtatggcgtcagccaaccgtactagatacaggaactcctaccgactcgggtacgcactaagttccgggtactccctcatctcgtgcagaccgacttccgtctagggggtgacaatacgaaatgagccgtgacaaaggcgatcgcgaccgggcaggcagaatttaccacgtcgatcttcgcgatcttcatcatcagtcgtcgagtcacccatgacgtcaacagttcaatggcctgcaatgacgaacaggtccaagttcaattcagcatacaggcagtgcgctggggtctcggatgagacatacccagatcgcaaccgtagccaggaaggtcagttggaacgtataaggatccttcgaataattgaaggcgaagaacgggtaaatacctgcgtacaatgaacacaagtagatgatcagcggtcggtatgtacgcacgcggcatgaacgagacttgcgggaattggtcccaaaatgcaagatcgacagccagcctgtaatccggcaagaccatcttgtatcagtcgagttatcggcgagtgtcgactgcagccatggacgacctaccgagaaatcctagaattgtgacattctgcgcgactccccgaacgtaaaatgtgatcgcttgagcatccaaatgttcctcgtacgatttaccatagccaatgacgatttgcaacgtcttgtaccaagtcttggtcacctggatgggttgcagggtgattaccgatagcgaggagacgagctggatgagagcgaactgctgaggagatcggagtcgggcgaactgtaacgaaaaaacgacgatcttcagtcggacggccaaggttcatgctagacatgcggctgtacaggaactgaccaagttgcgatagaacgtgaataatacgacttggaagaaatactgcatttgacgattgaacttagggcggaatcgctcggcggcctcacgacacgacactgaccttgtaaagaaacaacaaggctcgcgaacggatgtgcgtcgaaatgatccagacagatagcccgttaagcaaattgaccgctgaggggtcaagagagagtatcaatataagtcccgatgcagagcaacttgtaaacttgctggctatccaactccacacccagaccgtagcgtcaatggatgtatgtggcaaagtcttcaagtagagacttgcaaacgctatatccaaaacgcgagcaaaaaaaacgaacttcagatccgtgcagggtgtggctgaacataccagcgctcaccttgtccgacgacgagcgaaaacgaggcgatgcctagtacggtcatgaaccaaagaaatctctcccacgatgccgggatcctcctcgctgcttctctttcaagaaagctagcgactcgagcatgatcaggtggggaattgatagatcatagccgacgccggtgttgcgggtccgacttacgctttttgcaacactgtcaaactgtgccgaaaggtgtgtcgtttgtcacgtttcagcttggagaagcagaccaaggccggcatgagcatcgtcaaaaaagcaagggcgatccaaaaggctgctcccgatcagagtgctcagcttggatgtcggaatcaacgcaggtaccgtgaaaaaccactgactcttgcgctcccaatcgatctcgtcgccagtctccccttcttctcctcctccgccttccatattccttctcctcccaataccgaagacgtctccccaatgacacccaaacccgacggccagactggtcgcccagaaaaaggtataacaggtcaaacctcccagagatcgcggccaccagttgagccgatacaagtcgaagagcttggtgatgaaaagcagtgctacagccaagtatatacctgtttaccaaagaaaggaggagaatggcctgtgagctcgaagtgtctttctccggtaggaggagggcgaggctgaccgtaatagtagaacaagaagaacgcgaaattcggctcgatgaccttcctctcataccgatagccttctgggtcggtacctcttggtgtagcatcatgcgccgggaaaggtatagccacccagaaccagacgaacaggcagggagcgaggacgagcacaacgtgtcgcttccaccagctctcgagccaggtcgctaccgtctgtttcgagggttgcaggaagaatgaggaccatcgtgatcgaaaagaacggtctggttgtcggggcccgtttgtaagcggcttagtgtcaggttgggtgatcgaggtagagcccttatgtgatctgtcaccgcgaggtttggaaggtgtgacgttgcgaggattaggacctctgaatggcgatatcggctgtcttgcagctttccagctagatcttgattttatagatcggttcttgtctggggtgatggggttctctgagtgccggcagatatgacgagcaaagtcgtttgatcagatcatttcaactatcaatgttttgaatgtcgacgatcaactccagctcaccgtcccattcccggtattgtcgcctctcgctacctttgctcaacggagtgaacatcgagacctacactggtccccatgtaggatgggaattactgtggctcagagactggtcctaccattgatgagtagctgaccattcgaattcaaggcgattggactgcaagctgatggatgcatggaggatgctcgtgatgaccgggtagtttcggatgcaaattactggtcactcggattatttacttccgaagtgagtgaagggagattgataagatcgcctcaatctcatcttgcaacgcacaattcgacaactgatcattgacaagatatatctcaagctgattcaacagcaacagacggaccaactctcaaagaagatcctgtcactccatcggactagtctcggagtagatctgacagggcaacatgatcgccgtacagtctgcaccaccaatacccatgccctcgccggttccttttccagagaccagcgagattctgcccaccgacgttcccgtagacgcgaacgaccattgtccggtaagccttccgtagagtaatcttgcgtgacttatcctgacgcccccgattcttctacttctcagggcaccgagtcgacgctcgcagggaaaacggacgcatgtgacggctgcccgaaccaatccgtctgcgcagaaggacccaaaggtcccgatcctgaccttccgttgatccgagaacgactatctggagtacagagaaaggtcttggtactcagtggaaagggaggagtaggaaagagcacgttcacggctggactgagttgggctttggctgctgatgaggacttgcaggtgggttcgtgacgagccggcatttgaccatgtctcattaaccatgatgtcacacgcggttattagaccgggatcatggatatcgacatctgcggtccgtcgatccctcttctcaccggattggagaattcgaccatccatacctcggctcaaggctggtcaccagtctacgcgctgcccaacctgagcgtcatgtccatcggcttcctgctcccctcgaaatccgacgccgtcatctggagaggacccaagaagaatggtctcatcaaacaatttctcaaagacgtcgactggggtgagctcgactacctcgtcgtcgataccccacccggtacctcggacgaacacttgagtatcgtgcaatacatgaaagagaccgggatcgacggagccgtcatcgtaacgacgccacaagaggtcgctctccaggacgtgaggaaggagattgacttttgccgtaaagtcgggattcccattctcggcgtcgtcgaaaacatgtcgggcttcgtctgtccgtcgtgcaagaccgagtcccagatcttcaaaccgacgacaggaggggccgctcagatggtcaaggagatgggtctcgagctgttaggcaaggttcctcttgaccctcggatcggacagagctgcgacgaggggaagagtttcttggacgagtatccggatagcccggcgactgcggcctatctcgacatcgtgcagcgtgagtttggtatctagcttacgaattcggatcagtaccgtttcactgacagcgagccggctaaacttgcaggcattcgagaactgctgggagacgcttgatcccgatattttgcattgatcccacatcaaagttgtatcctacccattcaagcccagaccggctttcgtttccttttcagagcggatttacgattatctgcatacgtcgttaagagtcggccagacaaagtgaatcctgcgcaggccgatcatacccttattgaagacgagctcgtacagcgtctgttcatggggatcaatcccgctctcgctgtggctgccgaagctcgtcccaatctcccttgtgcctacaaaagctcgtccgctctgttttacgcatgtccgggctggataatcttttggagcccacttccgtttgattgagacacgcaccgagagacgagcgtttgtccccgaagactgtcattgctacattacccgccttactttgacttctaaaaattttcatcgatatgatagatattgattaaaatgcttttggaaggtgttcttgcgtgatatagtattctgagaacacatgcgagcgtttgcttgcaagatgtaatgagcccctcggggccagcggcagtcgctcgaattccgtcacctgtaacaaggatacgattgtgatgtgacaaattctatacgagatgacgacccagatcgattctggaggttgatgcttgcgcttgagatgctgcttgcgcagccgatgaccaacacggggggtcttggttgctggcaagaccgacccaggctctcgattaccgtgggcatattcatctttgtttggcatggtgataatgctgctgtctacctgctgttactcttgtcgcagaatgatcgtaagcgagaaagagaaagtcgcaacagggttgtgcctagtctacctctaataaggtttctcatgtccacctttcaacagactggaataaccactacaacgacatggttatttattacaaaggcggtcaacaagttgttgaaggagaagttcctgcctcaagtacgagtccaatacctttcgcaggagtcgctcggtcaaaggggcgtatgtttcatcattgacactcgtcatcaaatcagcacgtcgcgccttgttcaaaacagtcacctcggccggagtcggtccggtcggatctacgcgttgaagcgtcatttcgtcactttgctcagcgtcggagagcctgtcgaccgagtcgagccaattcagtcgcttggtcgaagtcgcctcagtttaagtaggttcggttcaccccgattgacattcgatcacgtaaatctgggcaaacctgtggccaccgtcggcattggaatctcggcaagttctgccagggctgccaacccactcgggcaattgtccgatgctcggccgggctgtttctagcgcgcgatacgccacgtttcttttcttggatccgagcagtctgcctcgaggagggtgggatatatagggcagacgacgattgtcctgccatcgtaatgatcacaagctcgaagctccacagcattgcaagtgagatcattctcacccgctacaacgttcctcaacaacacataagtctcgtacaacatggaatactgggccacaaccggtggtcttgccctgggattgcccatctcgtttgggctcgcggggatcgtccaactgaccaggtggcgcgcggccaaactagcacagcccattcctcaagcgtccgaggtcgatcaggatgccttcaagaaggagagggcggccaaggatgccgtcaggagacccaaactcaagatggccttgatggccgtatgctttgcgctgtacatggggttcctcttttgcatggaccgcatgacgtctatgatcaagctaggcttttggggcggcctcgccgggctggcaatcgtgagtctctcattacgcaatcattctcagctcataagttgtaattgatggggaattttctgttcatcacagtctactcatgtcggtgggttcttcacccacctcaccggcgttgtcggtatcggtctagctaggcattccaacaaaggtgggcatatctcggaaacgatacatttccttgcagacggctgacgcggttcgcaagcagaactccggatcaaagaccgtgtcgactcttggactagctttggtatggtcgtctcggtcggtgtagcgatgacggtgatcacgatgctcgtcccgttcttcgcccccggggacaaaactcttgcgatggccgcctttgcgttttttgccgccactatcccttatcgagtcatgaccaacacgtccaggatctccaacaaacctgctactcctctcaagtggaggttgttcgggatggcagttgccgtcatcgggatgctcggtcttttcactttcatctgggccatcgtcacggcttttgctctggctttccctggcaaggagtctgagcccaagactcctaagaaggaggacgatcctgctttcctccaggcgttcatgaaaatcatgatccactgcttcttccccctgcagttctgcaccctattcggatccgtcggaggagtcctcatgcccgccttccgtgtcgattggctgttggccaacaagaagaccggtgtccaactcgaggacaacgccgggatcgaacgcgaaaaagagatcttctccgagacccgtgcgctcggcgattcggtcgacgagattgacaggaaggacctgggagagctcgtcgttgtgccctccttcgcccaactcgtcatgcgaggacagattgggcatttcctcgcgaagcccgtctacaccggcaccgccatgctcaccatccaggcgaccatgttcggatgtacttggatgggcaagaggctcgtcgaagtgctcgaacccgttaccaaggtgagattgagctcgtcatcctttttgggaaagcacatggctgatcgatcccgttgctcgagtagggcgacttccccgagggaacggccacggctatgatgagcagctttgcagccttgtttctcttgcccttcacccttaccccggtacttgccatcgtctctagcttgaggggtgactttagcttgctcttcaaccaccgagccgactttggcgtccactcgtccggcgagggagagaccgagcctctgctcgatgccgacaaggaggtcgaggatgaaaaggtcaagctcggcaagaaggacatcgtcgatgtttcttcctagatcctttccgccaatccccaccctgcaagtactgattgagtatctatattcgatactgccttgaaaccaaattgtatttcatatcgcttcgtgaaactgtcattatgatgtatcctgctaatcgttgttttctggctccggttcaatctttttcatggcgaccttttccacgaggaccttgatcgtcatgcttttggccctgatgaggcgttccagcttgggaacatcggtcatcagcctgtacgtcctgctccctccactcttcacggtcgctcccgattgttcaacctcctcctcggtcttttccggctgcgctagatccgctctcagctcgtctattaggtcgtccagttcctccaattctgtcctcaggccgaaaacctgctcgttcttcgtgtactcgacgatggcttccctcgcgcacgtctcgatgtgattgaatcggaccggtccgatcaaggtgccaccgaaccatcttgaacatacgagcaggatatccgaagcgccctcctcacgcagtactttgagaagatgctccgccccgtgcttttctccgtcatcgttagccagttgtcggggctcatagtcgtccggacgtgtgccttgagcaccctttttgagagctagatgctgatcggcccgtacatctcagtcgtgcccaacgtattgtaaccaagaacacatactcttgcggcccacatattgtgtgtgggcttgatcccctttttcgtcgagccactgctgccttccagccctcgtttcgacctccctgcaatgacgtctggcaatttgtggtgaccatgttcgaggcgttcgatcaagcttccgatatgcttgaaagtggcttccttctcggtgatcggcagaacgtaggcgatgaatatcgagtccttgtcaaacaccggattcgaagctgtcaacgagctcgaaagtggcggaggtggaggaacgttgagccatgtcgcgagggattgaggttgagatgccgaagcggtaggtcgggatggttcgttcacacgggatcgtttatttggcgaggcaaccggaaagtcttctactactttcctcttttgcgaggttctctcctcctcatccatggttgcgctctgctggagttacaaaacggttgacgcagatggtcacatatccgataggccagacaactttgagccccttcccggtgcaatcgtcatcgcctgaatacttgcggaagcaaaaagaaagggattgctcagtggtagaatgcttcatgcctggacgatagccgagtgcgacttgacctctttcctgcggcgctggtccgaagatcaataccctcctctgcgtctggtaagaattctccatgcaggacatgctcttgcatagcgactgtcaaatcttcccatcatactggtcgaccagtccgtagcgcatattcaaagtcagatcctttccagatgggacgagcttgccattatgtaaagatgaaatgaaaaacaaaatgcgcaagtcgtgactacaatggataatcatagtgagagctactatccaagctggcatcacacatggtgccagcctgtcctgactcgtgcgtaatgaaatgtcgctgaactcttaaatctcatgtatatagaggtatggcctaacaaatctacatgccgaaaacggcgcgaacgggggcgcgcaactacaagctctcccatctctggttgcccatactgagcaatcgggcgaaaagctgttcccttcgtccgaccgactggaactcgtacgaatccccctcgctcgagttcattcccttgacctctttggtatcgtcagcatcgtccgacgcgcgttcgcccgacgtcttcatacggagaagcaaggtctgggattcaatgtccgccccgctcgcccatccgagtacggcgcgcgggaccgagatgcccagctttttgagttcgacaatgtcgttgatgtcgcgcgtgaattctcccttgtcaccgatggcggcggtacggtacgagatggtgggtacgccccattcggatctcgggtcgagcacgatgtgaccgttcttgccgttcaatcggcacgggtaggctgcgacagtcggggcgagtgtcagcaggcgacatcgatcgttcacgaaagggcgcgacactgtccactcacactcggcatcaccgtcgtccttgagcatgtcaccccagatcaaccgatcgaccttgccaccgacctgtttcttgacgccatccaccgtgacatcggcaccgatccctgcgacgcgcttgctcatcttttttaaccctccgatgagcctactcttggacttgtgcatgaccttgtccttcatggcgaggtcgtcgacgtcgatcgggttgccatcgtcgtcgacgagctcggcgtcgggatcgggcgcattgtccttcatctgttccttgggggttccggccagaggaggtggaggcggacgaggcaaggggtgaccttccttttcgccgacacgcaagagatggatgaccagttgatcgttggtaggtaccccaaagagcaacgagtttcgcaagtcgagcttgtccctccaatcggggaccttttccttgaacaggatgatcccgcggtcgaggatgggttgaccgaaaaagaggaaaccgagcgtgaacgacgcgcctcgggcccagatccacgaggggacaaaggcggtggcgagcatgatgggcagaaagatggcaccggcgatcttgtaccgggccatgttgatcgaaggggggaagggaggtgggggtttcaaggcactagacaaacagccatttcagatcagaccacgtgtcgtttcacgccgaccatcgccgcgctgcgactcacttgaccatgatttctgacaaatctgccacgtccccgagcccatcctgagtcaacttcaagtacttgccgaccagctgatccctcttgaccttggcttccttgccctcggcctttttcctctccttttcgctcatgggcttgtcgacctttctccccgaacgcttgtccttgaccttgcgggtctttcccgacatgcctgcgtgcgacgcgtcatcgtcatagatccccctcgaagccttgttctgacggatcaactcggtcgggtgttccccctcggcgtacatgtccgaggtgatcgcgcgtggagaagtcgggtccgtctcgttgcttcgggcgtctaggaaatcgtcgtccgagtcgatcgacgtgatcgaggtggcgtctgaatcttgggacgggtcgacctctttctgaccgaccttggaattgccctctgcgcccgtcttgccgtgtgagacggccagcttgaccatgaacgtctcggccctacacgtggtcgacgacgaacggacacgtaatcagcccagaccgctcgaggtgcatccaaggatgcgcgggggagggggaactcacaagcttctgaattcccaagctgcctcttccttttgctcggccacgctcttgtgagtgacggcgctatccgtgccaccgaggaacgtctcgtctcccttcctattcgtcggatccgtcgcactgggcggcatcccctttctcggcgggatgggcgggaagaagatgatcctgctctctggggagacgatgaggagcatgatgaacccgatgactgtggggatggccagtcccaagacccatccgaggaaataagtcgcacagaaataagtcgtcctcctcctctcttccggtgcccaagaacgtagtcgattcagctctccgaacccgcgcaacaaacccgtcccgcctgaagcgtagagacgttcgaggttggatttgataatgtccgtgctgtacgggacgtcggggaggacggatcgacggaggtcgggttgctcgtatggcaagggtcgaaccgaggtgaggatgagggtgtgtgtgacgtcctggtcgaaccgacgcatgagggcgaagagttggtctgtaatggacgtttatccgagcgggatcgacaggcatggtgatcgtggtgaacaagtcgagcgatgaggagaacaaaccaaacggcaacatcagctctcccgtccttgtcacccatgacccccaagtcgacctcgacctcgaccccgaaccggacttaccatcctccaacccctcgacgactgttcccttgggctcatcccccctgaccgccctcctatccgcttccgccttttccaattctctacccacgatggctttatccccttccgtcccgtcctccttgatcgcgttcaagtgcccggcttggacgtccgggtgggtggtacgcgaggtggggagcgtaccggtctgttccctcgtcgaaggtcgctcggaggaggacgagttcgagttggcaggctgggcggcgtgggaagcttccgcccgggtctccccagctcgggcttgttgttgctgactttgcctgagatgctcgtaccgctcggtttccctagcatcgtcgacctcgggttggacggccgtcccgctcgagatgacgccaacgtccctgcccctcccctcatcctccatcccgggcaagggacgtctctggacgggtgggctgggcgggttgtcgaccagggaggattctgtccgtctgatcaggggtttaggggtttgacgtctgatcgcccggggtcggctggacgggtcggttggcgcctgctctaggggtccaggtccgagctgggtctgtcggtgtggttgttgttgagcatcgatggggagttgtccgatttgaggttcggtgaggaggatatccgagtgtggttggatgatcctattcctctctggggtcaagtgggcttcggaatgaaccgtcgtggtcgtagtcgtggtcgactggggggattgaagctgatcgaccgtcgggtgtgcggggtgtgcaccaccgccgccggtgatcggtgcgcctaggtctagacctgcaggaagagacatggtgcgggggccaaggggtgtggcacgaccaggtagcaggctttgagtcttgtcttgagatgagaccgggtcgaccactaccttgtcatcgatggtcgaggtcgatagatgaagagatgcctgcctggtgttggtgagcttctctctcgtggctgcgtttccgttcaccgttcaccagggtggaactaccgtgacgtcatgcgcggctcatccccgcaagcgcaatcacggcatctttgcgcttttgataggtttcgcagttcacacacccacccactaatgactgaatgatggatgataatatcgtatccgcgggctccggctcctcctcgttgccccgtcatcaccccgctgcatcagctcacactttccatcacttcgacctggatcaccccaccccatggcgacctcgtcttgcccgcggtgtgcaatctacaacttcgaccgtcgtgtagatgatcgatcaaccaaccaaccaaccaagcaaccacttgatccatcaaatctcatcaaatcccatcacatcaacgagtttgatcagatcagacaactcggtcgtcgtcatgtcaccaccatcgacatcgacatcgacatcgagtctccccgcgacaccacatcacccatcatcaccccaccggacatcgaccgcgacgacaacggctcatcgagatgcagatgtacaccaccatgagatggacgtcgagcatatcagcgatgctacggatcaagacgtcttgttacaggtcagcacgagcccccttgcacgcccgcccgggcttctacttcatgatctggtcttagggaatcaaacttgactaaccgatcaaattcaacccccacacgactttattctttcctcttgctctctcttaccaaactttcatggtgtattcacaatcatatccatccactctccaccatctcatctcgtcaacatacgataaaaacccatacaactcggcttcatccacacggactccgacctggacggacggggacggggggtatccgaaatatgaacctacgatctcgtcgcacgcacttcgaatctccacagacgctccaattgggaccgtacgataaaccaccttcgccctcgccctcttctccttctcatcagatcgatggcgaggagaggttgagcgctgtcggacatgacgaggatgagcacttgcacgagcttcatcagcaggatcaccaacaacgacaaggttcgcatgggtcacggcgccgggcagatgatccgcatcagcccgaccattcggaccaccccgacgacgacgacaacgacggcggtgagggagaggggcatgatattacccggtcgacgtccgggtaccctcacaaccacaacgaggatcagcgggaggaacatgggaccgaggtcgaggtcggggttgagatggggccggagggttacgtccattctcacgcccacacggcatcgcacgcgctatcgtccatgggacccgagcggcgactaggggacggtccggaagaccagggagacgaggtccagatcatgacgctcaatacggggtatgcgcagactttgggtcaacagatggacgaaagggatcatacctccgggcagggacacggacatgaccacgagcacgagcacgagcacgagcacgagcaggttgaggatcagggggcgggggaacgaggtcaagggattccaagcggggtcgggtcgggctcggtcgatctcgctgggtcgacgagcagagacgggcatgtcaccgccccggatccgagtacaggcgtccacgagaacgagaacgagaacgagaacgacaacaacaacgggaatgaggacatggatgtgaacgtcgatatggacgtcgatgtggatgtcgagttggacctccgggctagatcacaggaagacttgtccaccctgtccgacctctcggatacgcccgaccctgatctagaccctaccccgaatttcaagccgggcgctatcagttcacctggccgtcgacgtaaacccgggactttgaaatcgacgaggtcgacgacgaccaagacgtcgatcaagaacaagaagaaacagcccaacccgggtcgacccaagaaccctaatgcgcctctagggtcgcatcaggtgccttccaacttgacaccggggagtctggccagcgcgcaaggacccagggctagggaggctctaggcgatcattcgggtgcggcagggagagaagaggtcgagaggctcttgatgactgtgcgggctcaggcgctgaacaagggtcccgagggggagccgggggaaggtcttccaggtggagaaggtgccacctctgtcgatgatgctgctgctgctgctcagggagaacgagacggcgcggaggaagcggacgagagtgctatgggagcgacggaggacccagcgggacaggcgctcttggagcaagggttgggtttgggagagtcttgctgggaggaaggcaaggacggtcgaggactgagcgaagaggggaaacgtcgggtagaagagattgtccgcgggatcgccggacaggtgagtccatcgatggtgccacgaacccgctcggcggaactgggtcgcgatctagctcgtgctaattcggtacgtttccttgcgtaacgacagctcgcccggttacacgcagcgaccaacctcaactacctcttgctcacatctccacccttcccgccccccgtgaccttccctacattgtcgttctcgccgtcttcggaaacgttttggacgtcgctacgaggaactccggcgcacaacctgtccaagtttctctccctctcccacccatcgttgacgacgcgtcgaatggccattcctacgggggcaaggtcgctcgacatcaaagcacggctgaacggtcgaatgagggaaatggtacggaccgtcagcggcctcatcgaggccgagatgaagtggaccaggccggagagtatggttcaggcgtatggcgtcaaggtggtcggttggcccgccgaggataccggcgaagagggcaaaggagcagtgcctttgaggaaccccagtaacaattcagcacagtaggtcccttcgcgtagacagcaccgccggacgagtcttgaccgacaagctgactgcatcattatccccgttgataggcaaaatcgatatctgctcgaactggtcgagaacggcaccttgaagatcgaacaggcgacgagggaggacaaggaagcatttgccgaatcgttcgcttcagcggcccccggcgaagcgggtcaggcaggtgatgaagggtccgtgcaagatcagccgcaggaaggagatgaaacgctcggagcggcggtggaggggcaggatggtagcgggactggcgccaagaagaaacgtggcagggtcagcaaggcttcggttggcgctggagccgggaaacggggaagggggaaacatgcagcggccaaaacgcgcgaggcggagcattcaccagtgatggagttcgatccggctctgacgggatatcctactgctgatgcagtcgaggaggagacggctcagccggtggctgaaaatagtgagatgcaggtcgacgtcgcgactacattgcaggaaggactagatcgagagctcgcgacgagtcggcctgccgagcttgagtcggcagagtatggactggtgcttccacaagaaacgaccttgttggcggccgccgaggcagctgccgcagccgaggaagagaccgtcaacggagctgtcagcagtgcggtgccattgtcgacgtcgtctcctcagactcctgtagcttccacattgacgccctcgaaacggcttcgacctctagcgctcaacccggataaggacggcctgccgcgacctcggcccaagtcgttcttgatgctacgtccggacggatcgatcgtgcccaccagtcagaggcagctccgagctgaagccaagcgaaagggcgaggtgatcgacagtcccagcgggtcgaccagcaagaaacgtcgacgtgtgcaaccggtagagcatgacgagatggtcaatctgggcggcgacgacgaagatgaagtgattcgagcgctcggggctgcaagtgccgacgtcgccgcagccgaggcggcacaacagcacggagagtcggcggccaacatgttcctgcgggacacggaggatccaaacgagtcgctcgaggtcggggaccaggactcggcgatggtgcttgctatgatgggcgattcggctcagatgatgaggcttatgcagcaacaagccggggttggctcgtcgtccgcctcgtcactgcagcagcagcaacaacaacaaggcggaatgggaacgtacggtcctccgcccggtactacccacggtcaacacgcgcagatgctgttgcagcagcagctccgccatcagcgtggagaagaatcgggcaggacggcaaacgagcagatcatggagttgtaccaggtcactggacccgacttcggtcaagcggtctcgaggaccggtcccgtctcggccggcggtctgcgtcccggttcagtgtccggtgctggacagtatgacttggatcgcagcgtcacctcgtcttcgaatgactctccacgccacctggtcggatctctaggtagaaatgtcgatgcagcttccaaccgggacgagccggacccacagcaattgttcaacaacttccaaatgctcaacccgtacatctcggccgcacaagacttggcataccgcccagcctcgggggatggacaacacgacgatgtgacccactttgatccgtcagatgacctagtggtaagcgccagtcgcgaggacgaaggcgacgaagccgagatcgacgtcgagggcgagatgaacgcgatcggtcaattcgccgagcatatcgggggcaatgagcgtgaagagggtgagaatggcatgtagtgcgtggtcttggcgactagtagcgttttctgtttgacgaccctttacgaccaagacgaagagactgcttgtgaattatgtaataaaagaccgtgactgaaagcacgcggaatgatcaaagccttgcgaatacaatatcgatacagtagtgagggaggccgcacccggccctcgtacgaggtctcactccctttcgccctcttcaccccgatcctgttcactcttcttttcgtcctcctgcttcttcttttcctgttccttctttgcgctcctctcgtctctccatcgttcaaaccatacggccgtgggcaggcagatcaagtgcaccccgatggctccgaacaaggctccgaaatgcaagccgagccgatgcgccggagccgtattgaaaaagatgattttgctggccatgacgtggtggtagaatgggaagatgacgaaccacttgtagaacgggtccaacactgccaagggctgaaaggaggatgctacgaggcgcacgagcggtcgatcagtacggaacgacggcgggcacgggggaagaacgcagaaggaacgccgactgactgatattgaggataatccagacgatcaggaagaggggcaggaactgggccgtcaagacggacaacatggtctcgaacgccaatcccagggcaagaagggtcacataattcaacgcccagtccacgacgaatccgctgttttccgtcgcccaaggtgcgcagagagatacgcggtgagctgtatgtcaccgctagcacatgagatcagggagcaatcgggactcacgctctgccgacggtgttatcgaacgggaccctgaacgcagcaatgatgcaagtataccagagcgcctattgcgagcgattttcgtcagctcgctatcttgtatcgatatccgggctattgaaagcgcgggggggaagactcaccatccaaaagtagaagaacgcggggacgagcaatctcaacccgatcaaactcttcaatttcaacttgttctgcaaccccgagccagatcgtccgaggtagtgccaaagtgccaggtgaaacgcaaagatcaagtaactgtgaggatccacgcgagacagtgggaagaggaccaaatcagacgttgggggtgagcgatctccatgagtagcggggcccacccgatcgaacgagagaagagacacgagacttactagatatcacccgcttcaaagacggccgccgcgccccaagccgtctgcggacgaagatcatccaggtaatacccgaaaggtccgctcatcccctgagggacggcttccaggttccccaacagaccgcccgtggcgggtgtgagcgcttccgtagctgggtattgcgagggtggggtgtacgaggcggaaagggaggtgaggatggtggagagggcggtttgcgaggcggtctggaggacgttcgaggcatccctgatcaactgtcgagttgagaaaatgaggggacatgagtggactcttataatcttaggcacaggccccgcttcgacccgggtgaaaactcacaaacggccggaggtagaggagtacgatctggtaatacctagccccttcgtaatagatccctacgctcccctgtggatcatatccctgttgtccagtctctagcgcgttcctccagctagccgtagcgttactgtgaatgacgatcgccgcccaacacttcttcttcaacacgtcgtccctcgcactccataccccgtctaggtactcggaggagatggtgctgacgtcgatgatgttgtagccgacgtgaggagtggagaggggtagagagttttgttccgcggcgtaagatctgtaagcgggtccgaggatcggagtgatcccgagcgagttggaggccggggtgtcgaaatcgtaaacgttgacggacagtcgtgaaaagtatttcaagagttgatacgtcgagcccctaagaggtcgagacgaacgatgatcagcgtgaatgcagacggatcaatttcgggttcactaagaacggcaagcagtctaatgagcatggaaactggacttaccagaagatactcaagcaggcccagagcaagacagtcaacatcgccagtgtcttgacataatgcaaccccaaagtcttcctatccttcttccccttcctactggtgatcccatgcctctccctatcaccaccgatagcgtaagggtatacgctgccgttcaagtgccgggtgatgaaagcgcgtttctcttcatcctcgtcctcgttagcatgagccgtttgtggggtgtcgttacggatggtggccgtctctgatgaccgaggtgaatgagacatcgtgatggtccttgtcgcaaagtatctcgaacagatctggcacgagtaaggcgagccagaacagatgaagctttatcgaatcgatgaccttttgacaaggtgattgaaaacgtcgagttacgctcaacctatcctgcatgagatacaactgtcatggtgttcaaagtctcaaaagtcaacgacgatacctcgatcgagagcataggatcggtgacaagtttcgtgtgtctcggcaacaattccagctgaaatcatccttttcggcatccgtcaacgtgatcctccatgcttccaggcagaaggaggcgggaacgtaagcgggaatttgagtttcgatgatgacgtcgatgacgatgcgtcgcttacacgtgtcaaaagtctatttcttgacatcgaaagccctcgcctcgcctggcaaagaaatagaaaagtttccgattgcttccgttctctcgatccccgagatcaccgaacgacgacgaaatggtgaacgtcagccctacaacagcttagaggaaagggactctctcgaatggtttacactttacatcgggtgcgctgctgatcgacatatgaacattgaccttttcaaacgacaaataggcacttgttagagcaaccactttgactcatcccaccgaatctcggctgtccttacatacctcgcgtgcagcgcctccgtcatgccgctcctccccgagaaactgcagacgagctctaatgatccatccggatcccctagactgggattatgggattcgtcattgaaacaagaacgaaaggggacattgaagaagctcttactggtgagttgtcggaagcgcacgaagaagcgtcagactcaagtgtgaagcatggtggttgatctcgtgtggtattctggctggattactataggcgttccttttgattaccatctctatgtggttgttcctcccgatctactttgggtcgtactaccggtgagtcacttctatcctgacacactgaatcaagccttgttcaccccgcatactgattccattcatgacgccttgcacggcgacctcgcctccgtacgcccatagacaaacggaaaacacttaccgtctcaccaccctcatcctcgacttggactctgccgcatctaccctctcctcctcttccctcacacccggcacctcggcgtacaccgccatcctcggcccacaaatcacttccgccgcacggaattacctcgctaccgtccagcccttgacgaacagcacgacctggtccttgggctacactttccccacccaggaagaactcgcacaattttccctaccttataggatcgaggggggcggtatcgggtataccccgggggtggatccagaggaatgggccaaggagaaggtacacgatcaggatgtgtgggcggtggtactcgtcagaggcaacgcgacgttgttggcactcgaggctctcgcagggaggggcgggacgtatgatcgtgagtgacatccttcgatacagagaatctctcggtatgaacagatgactcatagactcgatctgatcttgtttggactggtgtcctgcacagccatgggcagcatcgcgatcatttacaccgaagctcgcaatttcttcacttccaaccaatacgtctccacccaggtgaccgagctcgccacctcggcttccaaccaggcaggatcggagctcgtgcagaatttccttcagggcaacgacgcagcgggggtgacggccgcgggacggatggccttgacccggccgtttgcgtacagcgagtacaacttggagccgtttgatcagctcgccggggaagcggcgactacggccggagcgatctacttgatcgtgagtcttccacgcgcgtctctcccgcaggcaagcgttaaagaatttttcctcttacgccggtccgacccggtacagatctttgtcttcttcttcacgcccatctggactggcgtgtactcttccgtccgaactggattgacgctcggttcagacatcttcctgaccattgtggccaacttggggtggtacttttggatctcgttacactactcgtcagtgaccccactttgatcgttgtcgccttgttggcaaggcccggctgaccatgctcggctactcaaacgcagattattgtctctcgctttcggagtcaatttcactcgggctaggggttatggagggttcccgctctactggctgtaagctgacgtcgaagcgcgtcgtaccatccagtcgacgttaatatcttcctcctacgcatccggacgtaggatgaatttcgtgacgatgatggcgctcgggttccctatgcaactgatctttgagatcctcggtcaaccgtactttccgttcttcctcgtcttttgtgagatattccccgtcgaaacccaggcacagcaaagcagaggagaggaggctgaccatggttccgatcggcgggacgtttaggggtcatcatcaacgtctcggtggcctttttggatctcgcggatatggaccctttctacagttatggtgagcttccgactcggtcgatcttaagagaggagaatattgacaactgaagcgatatgatttatttcgatcggcaggtttcgccttccccgtatggaacaatgtggacgctgcgaaacatgtgttctttgctacgaaatcgcacctcgttcagaactttgctgtcaaccttgcgtgagtcatattatcgaacaacagtctacattcccgccggccggagctgacggtcaagcggaacccgtcttgtagatgggcgatcgtcagcgcttctcttctcgtcgcactcgtcttttatagaaggtccaaagagacgaaatctgcttgggaaaagcacaggaaggaggttcacccgcctaggcggaagatgaggttggtcctgtgataatggatgggagagggtagtcagaagaactgtatcgattaggtattggcatgtttcgtttcttttttaccgttataatcatctcggtttgatacagcaggtccgtcttgctacacgtttcgttggtttcttgctgtcgctgtggccgtcgcggcgcttgcgggtagtcgtaatcgcgcgttgcaacccccgttctttaactaacctcttcgaaacccccgaaacccgattgatacgatttgatggatcataggtcactctctatagaccgctgcaagacttgacgtgggattgagcagtggccgggatcgcactccctcacagagtgggttggaacctagaactaaagcaacgcccccgtgaacgcgcaaaacccaagtccccctcgagtctcagctctgctgtcgatccgtagaatgtcaacaaacctacatgacctcgatgatctgaaagcgtaaacaaaccatcaatgacgtcctgtccttttttctgccgacgatacacctatcaacagcactattcaccttcgatttcgattctcctacaagatattgactcattagcacgtcccaaatatgccttacaatcccgcgctattgcgcacgcctccgcccttggacgacacgggcgttcgcgagacacctcgaccggtcaaagcgaggattgccgaattggagaaacagaacaacctgcttctcgaccagaaacacgcttccgaggtaagtctaccggctaccgaagctcttggttgatcgtgctgaccattcaccaaaaaccgcagcgaaggcaccaagctgaggtctccaagctgcagaccgagatggccaccttgaagtcctccagcatgtcatccagcttggctgctcagcgagctcaagccgagatgaatgggctacaacaactctgtcagcgatatacttcggagctcaagcaggtccaagaggccttgtcgaatgctcaggcggaagtgcagaagggcaaagcgttcggagaagggatgttccgcgaaaggatgcggatcgtcgagaacgaaaagaccgccctgcagaccgacgtgagttcaccttgccagagtcctgcatcctctagtactgaataagaatggttcgttctccagtacgacctcaaagttcggttgaatgaacaacgtgctgctctcaaagtggccaagctggagacgcagttgatcgataccgaacgccgagtgttgcagcgtgaccaggagaatcgtgagcaccgagaggacaatcgattaggtcgacttgctccgtgaaatgctgatatacacaatgtctcgttcagtgcaagtcaagcatcggctatcacaggctgtctccgaagcagccgatgtcaaggacgagctggtgggtgacttttgaaggggtcaggagtccaaggcaaggcgactaatgaccactacgactctgtagatcaagaagatcgacatcttgaaatcctccttgaggaaagccaacgtccgactaatatcgattgaggaggctcgttctgcaagcgactcgggttcgcaggccaagctgacggagctgcaagctgccatgaacgagcttaaagacgagatcaccgaggcgcagcgacaatcgagcaatgacaagaagaccatcaccaagctcgaaaagactatcaagtccctgcaagaacgcgagactcagctggagaaagaggtcgaggagttgtcctctgaagagaaagccaagggcggggagagcgacaagcaggtcaaggcgatgaggctcgagctcaagggcgtcaagggagatcttaagagcaaagaggaagaggtcaaggagctggaagaggaaatggaacgtatccgaaaggaattccgcgaaagggaaaaatcgaccaaacgcgaaagtagggagaatgtcgatctcaaggacaagattgccaacctcgaggtcagtaataacgtgcactcaatcttagtattccattcagattctgatatcgtgtgtggtactacaggaggagatcgactcgctccgacgcaacaacaccgctctggtagagaaggccaagaagtaccgaagcgaagccagggctgcgggaactgctccttccaaggagaaggaaaggagtgtctcgcccgaacctgtcaagaggaaagccgtgcaggctcgatcggaagtcgttgttgagagcgaggaggagaaaggagaggtcgtcaaagcccctaaacgagctgtacgttacgcgcgattgagcttaaggaaaggctcggctgaatctgctttgtttcgcaaaaggcgtccgaatcggtagtcgccaagaagcccagcaaggtcagtcgagtcatgattgatgtagaccgccgtcttgggcgcatggctgaattgcgtatccacacatagcagtccagatacaaggcggcatcggaggacgatgaagatgaggatgaagaggtctatcatccgaagccgagggtgagctcgatatcgcaatggtatgaatacgattccagctaatttccgtactgggatggcaggctggacgtcctggtcgaggagccgctaaaacgacttctcacactgaacagtcaggctcggagcaagaagaagcttcagcaaggaaggcgagcaaggcctcgacaatccagtcagtggcaaaaaccgcctcggtggagaagccggcaccgaagcagccggcagtcaagtcgcgtcccgcacccaactttggcaaatcccggttggagcccaccattatggaagaggatgagaacgatgagaacgcgccggaggaacgggatagcggtaaacggaagagcaaggatgcgcctcggcctgccgaggtggaaaagaagaaaaagcgaaagatcggagcggttgctccgctcgcgcccgccttcgactttaacggtttcttggtgagtatctttgcctcacaatggtcccccagggaacttttcctgacggcccgtgatatcatcgtacagaccggagcaagttcgggcaactcgttgattccatcgatcttgtcacccatgaagcccacgagctctagtctacctcgcaactcgctcggcgccagtcgaagctttggcagtagtctatcgagctcgaggaagatgtttgggacagggagtggtcggatatgattgaactgcccacaattggcaaatgtcttgaaggttgtacgtatagcgatcttgtatgtttctgacagaagtctggcctttataatgatctacgcgagtatgatgaacgggacttggcgggcgctactgttggctacggcgccggttcaagatttgccctcttcttccttcgcctgtttgctcaatttaatcagatcgggtgggaaaatgacacccttaactttggcgttccagtggttctccagctacagaacgccgcgataatacagggcatatgtcagaatacgagtagaacgacgcttggactagggaggttcattcacctgcttcacggtcaagtcgggaaaagtactcttctggagctctgtccaattgtatcgcaacttgatctccgagatactcagtacgtgtctaatcatagcacgatctgcctcttccgtccaggtaatcttggtagcggcctgtttcttcggagactcttttctgtagggctcggctttagccttgggagaagaacccggtgtcttaggcatagttgtgctacagataggacgtgagcggataacatgccgcatacgagaggctggcctggcatttaccttagttggatgtggctggtgaatccgcctgctgagtgggtaattcgtcgatgttactaaaaagagcgagaagaattgctgcggagttccattagtgtcggattctatcttcactggctcttcttaagtaccttcttcggtctgtcggtggtccaaggccaatgatccacgatggctcgatataaaggtgcataggatcttcgccctttcatctttttgttcggacaatgtccagtattgactgggagtttcgaaaaaaggaacaaaatgtgcgtcacgttcgcgatagttcgtcgtgagaacacagcgcttgagaaagtcgaagtcgatcgccgatagacagtacatctgtcaagacaaagtcggcaacatcaatcatcatagtccaacagaatacaatattcgattacacaagaccgtttagaaccacatgtcttttgccgtacatctagctttctcatttggtgcttcgtaatgtttcattcgcccgactcggttttggtactcccgtctttaccgcctttcgcattcttccccatcttcaagacttccggaggaaacagcgcgtttttgagcttgcaatcccatcgacttctgatctaaggagtaggatcacatagtacgatcagcagatggcgaccataatgctacaaccgatttttaaattacttgagttggggtcaaatgaggaaacgcagtcttttgcaactcattgaagtcgtaacgaagattgatgtcggacttagtcaggacgtgacggatcacttgcttgtccatgtcctcggtccaactaacgcccttggccccagacgctttctgcttgctcgaggagggcttttcgtacgggtcggccttgacgtccggaattgatgagggtgctttgggcattgcgccgagtactcaagcggacagatacgaagaatagacctcaaggttttcgtcggtgctgtctgttggctacgtgattgtctgtatggtggtccgtttaaacgtaccgacaggaaaacctttgaggcaaacccgacccgaagcaaaggtgtatatgttcatctcggtgttttgttcaacggttcctcatgacacatcaagagtaccaagaccgacacctcgtgacagacgtcttagggataagcgcgatccacaatgcacaatagggaaaaaggactttcgagcagaagatcagagatcagagtagcagtctgccacgaccagggtgaccctatccgtgaatggatcgaatagtcttaaagctcgattctgattgtttgtctttttaaatctcaagcgtacaaagcgaatagcataactggcgcgcatcggcggcacggcgagcggaaatccatttagtcttccccaccgcccttgaccttcttgttcccccctttggcttatttgttctttttcgtgacttcaggagggaacagggatgctttcagtttgtaatcccaacgacccttgagctgctccaccaatctcgatgtgagcgctgggtatcgaacggataaagaggcgatgaaacgcgcgacttgtctgcttggccgtgaattgcttcaaagctccgttggcgaggtcagaccaattgtaccggagattgatgtccgaaatactgagaacgtggttgataatattcttgtccatgtcttcggtaaaggagacgccctttgctggaccagcgcgacctttgctaggcgattgaggtgggtaaggttcagtcttgactgaaggcgaagcgggatcggtggaggctttgggcatatctattcgtcgcaccttcagcaaaggtgagaagtccactcgcacccacgagtcaacttacttggcgataaaaattcgagcctgagcgaatcgaagcgtcgacgtagcgatcagggtaacgtccgagtgcaaacgagtggtacgaagtctgcgctggcttcttatatgctcaacgatccggcagctccattggggaccacccgaacgattcgcaggtgacgagccgagtgagtgtcgtgacatgtgatatcttcgaactctactctaagttgcgaaaggatcattttttctttttgttctctggatcgaaggcggcctaagcggaggagcgggataacaaacggagaagctctatccttgccattctggcttttgagaagcataaagaacgagtcgggagagctgagctcctctatctcagctatggttatgcacgagacgaccacaatcagatccaaatctcaagtgagctatcgatttgctaccggttactctgcaaggtacactgacgtcctcgagacctttcctgcctatcagcacgtcgttcccttcgtatcatgcctcgatcacccaagaagaaaaccgaggaagacgttaagcctgatcaaaagccttatccaaaggagcctgccaccaccagtccgaagaaggtgattcgaggatggaccaaagaggaaaaagagatcatcttgctaggagtcatcgcgtccgccaagccagatttcgaggtcatcgcaagccgtttggaaggcaggacggctagtcaagtgagcgaacttcagtccttgcattaatggcgagtctcactgaacaagggcacgccttttccaggccaaagatcaatggcgacaagtgctcctacctgccattaagaagaacgacgccatcttcggggttcgaggcggctgaaagagctcgagggtagaggacctagtagatagaggcgcagtcaaggtcatacgcgtaccacaggttacttcttcctcaaacggaatctggtgatacatgaaatgctactaccgccactcttatgcccgtcatatctcagttcccaactctcttttaatatgtctcaatcgctgcatgatcgacaatgcgcatcgagtctccctcatcgcctccggtagctgtcgcccccacgcctatcatggccgtcctcctgcttgaccctgacatccctcgaaggcgacctcctcctagggggcggggaatcgtcataccgacgcctcggagggggcgatcggctatcatatcggcgtttgccggcgtctcttccattgcgatcatcgtcgtatcgccttcggggcggactcctgctatcatcatattgcctgcgaacgggagcgggtgatcgatcatctcggtcgttccgtttagggggaggagacctgctatccgagtaccttcttcggcggggaggcgagcgagacaagcttcggtcacggccgttgcgtcgaggggacggcgaacgacgtcggcgaggtggggaacgcgatcgagacgaggcggaagaactggaatccgagtccgagtcgctcgaagaatcagaagaagaatcactactgtcgctcgagctatcgctgtcggaagattcggcctcgagagccgcctgtcgttgagccatgatgatcttgggtgcgttctacacggtaaaaagtaatcagcctcgtcgcctcggctcgcgatttgttttccgcatcaactcacctgcaaccaagttcgcatgtcttccgtgatgagaccgagtccgatcgaggtaaagtagttgatcgcaaacctcgtgttcttcgggttgtcggtagggaagatcccggtcaatgcctgtgccaattcgggctccttgagcctagcggccatcttcttcaagccgacctcttccatgacctcttgcatcaagatcttgacaaagatacggctggacgatgttgtctcctcctcgttcatatgaacgacgtgcaagactgcccacgaaataccatccgaagcgacgagatgaccgaatagtcgggcaatgtttcgcaacttgttggtctcgtaacgatggatcgtctcgtagtagtttccaaaggcctcttggaaggactctgtccagacccggttgagcttgcagaatcgttcggcgatgagaccgtagaactgggtgtaagatcgctcttgagagcagcactcgatgatcatgttgcacatttcaatctatgatggatgatccgagaggatcagtgatcgcccattaattgtgggctggtctagcctctcacctctttgccctcgggtaccgaaatgttcatcagcttgtggacagcttcctcgaatccaagcgagttcatcagggtcaagtagatggtcctcctcaagttgatgaggtccgtctcggtcatgtcctggatcccttccagctccggcgccactatcaggatcgacaagatagagtgagcgggaacgaggggtcaacgacggcatactgcgggaggcttaccgtcttcatcatcctcctcgtcctcggatccttcttcgctaccgctctcttcgtcggaatcacctcccaggatctcttccttgatctcggcgtacttttcctcattgtcgaggaatttggggtcggccttgaagacgtctgcaccacaagcggacaacagagccggtcagtcatttgccaaggtctagctggtatcgctcgcacgcactcaaggtctcctgcacctgcagctcgtcgtccaaagcgatcctgtgcgtgatctgctcgtcttcctcgaccaaatcgagaccttcggggatgatcgggttgtccttgaacttgtcccgcctgacctggaacaagacctcgatcatgtattggaccctcttgtcgatcgctccctcgtggaggacggctcggaaacgctcaaagactccgttgttggccttgggagagttttcggccaagaaagctccgacttcgcgcataaacccgacggcgatttcgacgctgtcgtcggtgggctgttccagcatgaggacgagcatctggagagcgacaatctcgtgtgcaacggattggttgaccaagtgcgcgatgaaggaggcggtagcttggcaaacgatctgtgagcgaccaaagaaccaattgagcttccgctccggtttcgatgattccgtctctccccctcgtactcgcacttaccttgtcatcacgcttgaacgccctcctaaactgactgatcagcctgacaatgaccagttccccgaccatgggcagcttggtattgatgatggcgatgagtgcggaaaagacgggcgtaaaaggcagggacgaggcctgggccttcatgatcgctcgagcaaagagtcctcgaccgcggatgaggttctcgttgaacatctcggggacgacgtatttgatattggccacgttgacctatgacaccaggtaccgtaagcgatgaaatgtcagtgatgcgagatgacaaccactcgttcgccagcctcaccttgttgatgagaccgttgatactcttcctcaacgcgtcccatgtcattcgctgccactcgacgctgctcttgtccttttccgcatccttctgcatcgccctcaacctgctaggagggatgtacgcccctccgctcctcgtactgacgagctttgcaaactcggcagccggatcgaattcggatttcttggcgacggcattggtggacccttcgttggcctgttcttccaacagacgttcggcaagctgcctttctcgttctctccgacggaaagggtcgatatcgaccacccgggggaggttgatagcaggcgcagtgggtgcttgagtgatgggcgcaccaggacttcgagcgggtacatctcgatcgtgatagtcttctggtgacctggagcgacgtcgttgcgtgggtggggagacggatcgatctcgcggcaatggggaaagcgacctgtcacccgatgtatcagccagtcgtctccggagtaaaaccacatacgcatgtccagctcacctcttcctctttttctgatcaaactcgtccacatcagcatgcctcgagacgggcgaaggagatctcgacatcttggtcgaatcctgttgcgtttcgtttttcttgattctcttgatcggctccaggcgtgtataatctgcacaaccgcaggagagtttatgacgagtgctatgccgatctgatgactagatatcactctagttcgtagggaatcgagtctttatagattggggttgtatatcaaagtggacacgagcgtgctggtgctcattattgaaagaccagacagagcgagttgtgtggaaggggagggaagggacgcgttcggaaccgaaaaacccagaaaagcagaacgatgaatattacataagcaaccagtaggacgagccacggtcaagaaaagtatgatgttgataatgtctgtatgatctagtcgtcaccatgaccttacgctggccatcggaaaagtactttaatacggcttgaagcgcttctgagccctgagatctgccaccttggcttgatcgtccgcgaacgctttccgaaggtcggccaaatctgtcgttcgaaagggacccccaaaggagaagaggtgacatgaaacgaggaaacaatgaataaacgccatgacgagctcgagatcagtcatcgcgaccatgtgatacgaccgagaacgaacgcatatggacgtaccctgccttttcctttcgttcctctggaatcggtaaaagccatccagctccaaccctcccttgcgcttcttccccctgtccaacccttccctcgcatcgacatcccctccggcctttttgctatccaggacgaacctccttgaggccacaccgacacctgctgatccctttcctgcggtacgtccaaatttgcctccacggacgacgagcgtaaatccgtcctcgtccacgatggcgccttgggtcgtcttccgtcgttgcagctccacgtgatggtcatacaacgccaacgccgagtcggcatgagctttgatcaggctcaaatcgggccgggtggatcggtggagttgggtgtagtaagccaacccggtcgtcgagggtgcgtgagagatggtgatcgctggtcgagctggggcgtgctcgagtgcgcgttggagggagagcggggagaggtaggtaaggtatgccgaggatgagggaaggaggaaaggttggtctcttggaagcagcgaatcgagcgggacgatcgtaggagcggaaggaccgttcttgttcttgcggcggcgtttcttgccgctcgcatcgttcgacacaggtcgagccggtcgtccagccccggccgagacgtctgctgtcgtctctccatcgagaccatcggttccgtctgcggcatcctgatcttcatcctcttccccctcgtcctcgtcctcgtcctgctcatcatcggaatccatccaagcctcgaccccctgtttccctacccgggacaccttgatcgagatgttctccaccggtccgtactctttgaaaatcgtccggatatcctcgacatccatatccaccgccaagttggccacgaataatgtccgaccgctggccaagcccatgtcggtctgttcgccggcatcccccatcagagtaggcttgacgagcgccgggttgacgagcccgttcccaccgtgactgatactgatagatccggaagactccccagccttttccgatcgagtcttatgttcccggatccacaagtagtggatgtctgaagatttacccttggttgatcgtttctcagagtcggcggacaaggtgatgcgaacgggaacgggagaaaagcctgaatgttgggtcgttggaacggatccggccgtggagcgctgtttggcgttaccgctgggagcagacttgattttaggcatagttggattggagaggtctggaaacgggtgtccagaagcaggagaagagggtttcgacgaggcaggttggacctccttgacatttagtaccttagtagtttaccgggcggtggttgctcttgttcgaaatatgttgaatcgacgaaatcacaatttttacatgtcaggctcatcggaaaggctcggtgatcatgtcaagtgcagtcgagatacacatctctcgtttacagtagtgtgttgcagtcttcttaattgcctgcatatacactgtgatcgctacctgacggacaaggtggtcttcacacaaggaaaaacgagtacgatgttagcgaaaacgtccacaggtgaccagaaacgctagaccttgccgctccataatttgaatttcgtccatcttacaggcacggacgtatgatatagaaagcggacagtggccaacggtgggacccagattcattaatggtcaaatgattgtttggagattttatgtgatgaagatcccaaggatgttgggcaccgcaacctgaggcttgtcgactgcatcgcgacaatgtcgacgaagcggatcgcgtttattcactctaatggccaagacggcgcagcgggaggttcagcggaattaggcaactggagacgcatggcatcttggcaacgtatcgagccgacagggatagtaacggcgatgcttggttgaagtacttttgccgaaaaaggccattaactaaagtttgtacttttgtccgaacaatgcgccgtctaggcattgccggatcgcggttcgaaagctcgactaggcgatctgggcagacatatcgcctgatattgctcaacggtatagaatcacaaggctcaaaccaaggggttttgattctcagggacgatagtacctcttgggctgacgtgtattccgaaatccgtgcgggttagtgcggcaatagaccgtgttcgcttactcataagcggtcagcgctggtggctctcgacgacctcgacaataatttgtaacgtcgacctggaatctgaaccgatgcattcactaggtatacaaccgacacttgtagactcaaagctcgatttcatacgagactcacttctcagaccatgcgtcaataccagctcgcccaccgtaaggatttttccggtctgactctgcgtgatgacgtagtcaagcctcgacctggcaattctaccgaggtcgtcgtcaagattcgagctatcagtctgaatgctcgtgatcttcagatcgctacggatcagtacccggctcctcatgctatcaaggacgatctcgtgcctgtttcggacgcggcaggagaggtggtcgaaattggcgacgacgtgaaggattggcagatcggcgatcgggtctgtaccgtatgcttcttgggacatgatcaggtgagttgtgaatattctgcagaaaagcacggagggctttgctgaagaaagacgacccaggatgaagacgtgcagatgcactctatggtcaggggtcttggtggagccattgacggtgtcgcatcgggtaagctagtcgagagctccttgtccgcgtccgatatgttaaaccggttctgcgatgttccgacagaatttttcgctgtcgaccaaagccagctcgtgcgaatgcctagtcatatgacgtttgagcaggcgagtacactgcccattgctgcagtcaccgctcagaactctttgtacggtcatcatccggtcctaaaagctggtgacaccgtcctgtgcatggggacaggaggagtgtccttgtttgcggctcaggtcagccggatgtctcctaggcaaactctctcatgtctaatctatcgctactccagatcgctcttaatgcgtcagccaaggtgatcatcacctcctcatccgatgacaagctcacccgagtcaaagacttgctccagccgcttgtccgaccgaatgctgcctcggatacgattcaaaccatcaatcacaatagcaaccccgactgggatgtcaaggtcgccgagttgacgggaggtaaaaaagtggactttgtcatcgagattggaggcagggctacattgggcaagagcattaggagcacccgagccggaggactggttgctatctctggctacatgagcgactatgcaaaaccagacgagaaggcgaaccaggaaggtgcgtttctgaaatggtcacctcacctggacgtgactcagcaggcagcttctcttgcagatctcgccaagatgcttctgtacggcgcggtcaatgctcgaggcaactttgtcggtacgttatgccatccagtcccactcggccagaccataactgaacccctctctgtcactcgataggcaacaagctccaattcgaacagatgaaccgagctttggaagtcggcggcgtgattccgctcgtagacaaggtcttcgaatttgaagatttgaaggccgcgtacgaatacttgcagtcgggaaagcagatcggcaaggtagtcgtgagggtttcgagtgattagtcttgttctgataccacatgaaatttgagctcgaagcacaatacaaccataagcgttctatgtctgactggatacgaagcgcgttctttaagagagaaggcctagagcgaaaattgaagatggatgaaggttcctttttaggtgactttgaggtttgagaagtgaacaagtggacagatcaccgatctaccactgccctccagcgaccccatcacctgtcccgcttggactatattcgcccacattctcggcgtctccctctggtaagaggtacgctgccagcgcgcttccattgttcgcctggctattgttccttccagggctgtcattcccctcggtcgcatcaaatctcgcccccgctccgatgagcgagaccagcctcgcccgatcctgagcttctgacgagtcgtccaaacggtcgtcgatcaattggttggatcgattctgatcctgcccggatcctcttccatcccgatcgtcatgccgagtcgacttgccgttgtgtatgtgactatcctgatcgtttgttcgagagaaggacgagtagtactccgtcccggcaaccgactggccggtagatggagggtatccaaacccattcgacgacgatgtatcgggcgccagactgaaatagtgtccggcttgttgacccgtccggtcatacgagtccctgccaagcccgtccgtcccgtacgatgccaagaattcttgcctcctcacctcgtactcctgctgctgctgttgttgttgctgctgatactgtttcatctttaatccattcttgtccccctgggcgtcaacgccatgcatgtgatcataccggctggcggtatcgagcgtcaggtccagttgtcctggttgacctccgagggccatggctccggccgttcctcccatggcgttgacgaccatctgctgggcagccctcgacccatcctcgtgtcccccttgccccggtccatctcgctgcttggcggcctgcctggccgacctgtccgcccgctgttgagccttcatctcggccgtcttcttgaccttgttcggacctctcatcttgcgttcgtgtgcgaagacgcagtcgaggttacgtgtcgtgcatcggccacacggttgcaagccattacactggcaacaagaggtacgtcgggcggatgtgatcaggacctcgcgatttattaacaacgcgatattcgagactcactctagctttcctgacgcgacagggctcgcaagcctgcatgatcctctttctctgcttgtcgtcctgaattctagcattggctcctcccaagatggggactccattctcatccagcaactcttcctgtgcaccttccccgcccgtgcccgaaccgacgctgccttgatattcttgctgctgcccgccgccaaaggaagaagggtgatccgggtccatcatcgtcgttgtcgatccggacgtatgggtctcaaggttcgaccggtcagagccggaagggtgattgaaatggtaaggcatcccccttgctcctgactctgcccgcttcccttggccctgaccttggatttggccagaaggcacctggcctcctccgaccccgagaccgaccccggagcccatcccgacgccgacaccgacgttcatcccagatccaacgttgacgcccatccctggggaaccgaaccccatacctccgatcccgctgagcgctcccaatccgaaatgatcgtgcaagttttcgtaacccccgaaatccccggccccgcttccgccgctaccgacgttcccggtcccactcgtagccccgactcctacgccgaccccgttcccattgtttcccgtaccgaccccggtcccgagcgcctctgcatccgcggcctcagccagcgtgtccagtgatcgtgggtacgggtcgtagatcgggagatgactctcatacgacgggtagagcgggttcagctcgtgcgtcgaggtaggatccgtcgatgctccggggtagaccgaagaggattgatgcgacgtttcgtggtcgtcgacgttttggtccttttggctgttatggccctcatcatcaccttgaccattactatcacgcccgttctgcgctagatcgtgaacctcgacctgttcgtcctcacgatgccgactcgacccgcccggcgaagcaggctcgacctggtactcctgacccggtcgaacggggttggatggggacggtatcgcgtcagaagtttcttcttgcgacatgccgagagacccaacgggggaggggtttcgagttgaaagggggtctatgtatgctcctgagggttatccctcccgtctggaaagtggcggtcggaagaattgtgggcacggtcgataggggtaagttcaagttcggttcgaatcgactcttgacgggcgcgtcgcgtcaggttacggtcgcgttcgagttccggaacgaggttgatatagtcagaggtcggaacggcagaagtggtgtgttacggcctccggtgtatgttctacggaaacgtctgatgtgaaagatattcctacaggatgtattggaaccgctttgagttgcttgacctgtacgtggtcaggacaaagatcgacgacaatgacaaggtcgaccgcggtcagtgcgtgatcatatggcccgaacggatcggatttgcatcggtctcatcgcggggatttcttctcatcctctcgtaccactcactcggtctctgccctctcacaccgtctacggaatgagcaaggtttgctgaggttgctgcaattattgctgtgatataatcggtcggtggtcgtcgtgactatcggttgtgaccgtgaatgtgcggatactagttgaaagctagtcactctgtgtgtggatccaaatatgacaagagggcgaagggcgaggtggcctctgcgtcaacctctctcttggatccgcaccgcacccggtttactcacaaacacaaaagaggtcgcgtcgtcgtctggagcggatagaggaaacgagttacaccgtattggaacgatgtccgagatcgaaaagaatgaagtttagcatatcgacgacgtcaacaacgatgtcgttcgagagtcgggctgactgtgacgacggggagtgaggcacagtacatggaaagccaatcacatcgaaggattacctctttgggacagacggctcctcggtactttgtaaaaatataaaacacgtcatcctttgatctcgtttatcaatttatgacgagcgaagaagaatgacgtaagatacgtgaaacaattgagcttgtcatggagtctccacaacctgcaacttgtcggaagcaaccgggggaaggttcgagaaagcgagcgctcaagaagctcatcatggataccgcgatatccttatttcgactttactaaaccaacgccatcattacatctatgatcgcatcgattccttgagccccatcaacgtcgataacaactgaatcaaattttacgcataacactcccaaactcgtatcatgtctgaacccaaccctcgaccctttttcgacatcaccatcgactcccgcccagccggcaggatcgtctttgagctctttcacaacgaggtccccaagacggccgacaacttcttgcacctctgtttaggggacaaggggagcaccgacacgggcgtcaaattgagttatgaggggagcgggtttcatcgagtgatcaagggcttcatgttgcaggtgagaagaggtcggggatcgtgatcccacgcagagcttggctgtcggtcgttgtggatgggttgactgatcggtttactctcttcctttttcaacgcgtccttgacttgcgatcttgttcatcatcgacattatcatccctttctaccggcgaacgaccccccaaaacctaccttctagggaggagactttaccaaccacaacggcacgggcggcgtctcgatctatggcgagaaattcgaagacgaaaactttaacctgaagcacgatcgtccgttcttgctctccatggccaacgctggaccggggacgaacgggagtcagtttttcgtgacgacggtacctacccctcatttggacggtgagtacagggtggtcccagcttgggtctcgaaatcgaggtcgaggtcgaggtctgctcttgaacgcacgctgacccgtaatcgacacggtatccccttcgtacccaggtaaacacgtcgtattcggtcgagtcgtcgctggaaaatcgctcgtcaggcagatcgaatcccttcctacctcgtcctcggacaagcccaactctcccgtccagatcgccgcctgcggggtgctctccccctcggaccccttgccgacgacctccttgatcgccggcgacgtgtgggaagactaccccaccgaccaagaaggtctgaaagaggaggacgtggctgggcatttggagatcgccaaacagttgaaggcgttgggagcgggagagttcaaagagggcaaggtggatgccgcggcaaagttgtgggaaaaggggatcaggtacttggacgttcatccgttcttgccagaggagacgggcaaggagttgatgcaagagtacgaggccatgtgagtgtcggctgtcgattatgcattgatactagtcaggtggacgtctgactgcgaagagatggctgatgaatcggcctcgtgacgtctcgcaggcgatattccctcctcgccaacacctcgctcgccgcactcaagacgactcctcctcaacctaaactcaccgtcacccagaccacccgaatcctctccctctccccatccaagtacgctctatccgacgccgacaaggtcaaggcgctcttccgtcggggtcaggcgtacgtctcgctcaaggacgacgagtcggccgaaaaggatttcaaggaagctttgaaattcgggggtgatgccgccgtcaagggagaactggccaagctggtcaagaggcgagaggctatcaaggaaaagcagaaaaaggccttcgggaagatgttcgcctaggcgtcgtcccgtcggtcccgacgtgctttttggatgagaagttgacgaggaaagcggggatcgggatgggttgaaaataacgaacatatacgtacggatacgcggatgaccgagcggagatctttcccatagaatacgatagagtagagcagagtatacgtgcgaccgaaagagatttgttttacgaggatcagttgttttgcgtcgagggtcatcctgcatcatatcattcaagaacagaccaagtcgtgatcgacgatgatatttgcctccggctgttgcgtatttacttccgagatgatttcccccttatatcacgtgatttgatcatttcctgagcgcgcgtttgaccgaacttcccctccactttgatcaaagagagcgagaggtaggtcgatccattcgatcaaggtcaaagatttccctcgatagtcgccttgctaaacaccttcgaagactcggagaaatcaccttcacgtagagcttatcgaaatatggtcagaactgaaggaagacctgtacctcgcaaggccggaggagccggaaagaagggcaagaagttcgtagaggacaaggtaggtgaagcctttccacaacgagcagatccatgacttctactccgagatcctgacgctgcgtcgagctttctagtcagcattgttgtctctgatcgatggcatgcctaagtggaccgccggtcgaccacaggccaacaaggaagacttggccgccgatgatcacatggcgagtaccaataatgacgctcgtggcgtgatcagcttcgagacggtcgacaagaagaagaagaacaacaagaaggggaacaagaattcgaatgggggtggcaagaaaaaggtcaagtcggccggtccgatcgacgcgagcgggggggtcttgattcaaagcgccaagggcaaggagaaggtggtcgagcaggaaggacaggctgggcaagttgcagaagaatcgagccagcccaagaaaaaggtggtcgatcggttatcagacaagaaccgggagctggtgagttgctttgctcaatacaaatctgtgacgtccgggctcgcgacgtgctgacaccccccgattccatcgtccaggcctcggcaaaagccttgattgtccagaaggaacgagaaagaaagaaacagaacagggctcaacgggaaggcaagcccttgccaagcgcggacgacaagcaggggaagaagaagagcgtcgggttcgccatgtaatctccctacactccgttcggcaggggacgatgcaggatcgcacgacgggtcgacggattccataatattgtactgtatgtcataccctagatggacatggataattacgaatacatctgccaatcgtacgggatacttgtgccccacacatccgggcattctgggacccctcgaccatcaatcggcccgccgatcgggaggacggaacggacagacccgtcgtacttttcccatttcctggacacatcaggtgagttgggatcgagcttgtgtacgaaagctgaccagcgtgagatggtctctttgacaagttctggatcgccttgaccgaacgtcgggaaaagctcatcctgcgagccggtccgaatgagtcatcgctacggttttttgtcaagtagcgggacttgcctcgtgacagacgactccatctcgacagatccctgcgacagagttgctcgggtaagtcgaccctctctgccattccccgagccagacaggctggccccacattcgagcgaaatctcgcgcaggacatctccaaacagcatccgtcccgatgttgatcaacatcgatctcggatcgtcgatcccggccaacctggccgctaaaagagatgttgagtttgtgagatcatattcagggacatgtctcagaacctctgccacctcaatgccgaagaggctttggatggtcaagtcgaaaatgcgggcatcaagggtcgggtccggaacagcggcctggatagcggcacctgattcatgggaaacggtggtgatcaacaacgggatatcgagctcatttctcccgttcagcaagatgtgttcgacgtcctgagagagcgagaaggttgatgtggttggtcgaaggactacaaagtgtcgccatcagcctcgtggcacagctattggcgcaaagaccccttctcaccttccgataatggtaccccttgaatggcttcatctccgctcaaatgctcaatgagactcccctgagcggtgaggataccttccgtactgatagccatccaacattcgatatcatcccgtgcgcagatgtgtcctagaccaccggcagattcgtcgctcttctcgtagattcttcgctgtatctccttggtcacaacagggctcgcgaagccgtatgcctgaagaagcgggtacagacctcgagttcgtcacttgctgctttagatggagttcggaagattgactgatcattgggtccgattgaatgatcgccgccctgaacatccccttcatgtcctgactggccaaaagacctgttcggatcttacctcaatgagcgatccgggtcttaaccacactgagcctgtctcacctcgaatcatctgtcccccgctactgtggcctgcgatagtgaccttgtcagggtcaccttcgaaactgctggcaatctccttgataaacttcagtgcggtctttacacctgttagcccgaaatttggatcggtggagggcacatcttgaggtgggagcatgccgagaataccgagactgcggaaattgtagaagaatagtcagggccaggttctcatccttacagtcagaagtgagcgtaattcgctggcatacttaccggtactgaaccatgatcacaatcatcccttccccatgtgacgctagggtggacccatcgagtccaggctggctagccgatcccgaaatgaaagatccgccatgtatcctgtccgagccagtctcaatcaggtctgatgtcgggagccgacattggcatgctcaccatacaagaatcggaagatcccgcttgaagattgaagtggacgacggggcatagatcgttaggtatagacagtcttctgactgaggaatcgaggacggtataatgtaggatggctgttgcgggcagaccggtggtaaatgcctagagagcgattctgaggtcaacatccgaatactgctcgttacttgagatggagaaggacaagctcgctcgagactctttaatcgcctgtccgtcaaccgtgaatgttcccatctcttggttcgggcgtactcgatcacgtatcgtttgaccccttcgaccctggttgccgtccccttcagtggcccaaacggaatataaacctcgtctcttcctaaaagctgagcgactctgttggccaggtatgttatcgatcgctgctgggtatgatggttgtaggtgttcgacttggcggcgtccgttacctcggccttgatcggtattggtgcacagatcaccgcgtgacaagcgatcagcaagaaaagtatgcctagcctcatatcgactgttttctctttatatatggcgtttcgagaaagagtcgtgaatagacgacctcttcaacttagtctgagattggaattatggatgtgaccaatatcaggacgatttcagaacaagaccaatgtctctttcggaccgatttgttgttggtcgtcaatggtcggaacgtaaaagtctttttgttccccacgcgggtcggcgacaacctgaaacgcgaatcaacatccgcaaccgcagcgcgtggtctatgtcctttgttttctgaacttacagccgttttgacggatgagatactatctttgccaaaatcttgaaggctgcattggaaagtgtgcttgtgaggacgtcctgcttttaaatgtgcgagcgtgctttggattggtacaagcaattcgtgacttgtcgacatttgcttgtttagggggttgagttgtgaaggcgctgagttgtgagccaaataattaaactcgactagttccgttcagtacactcatcaacctaaaagaaaaagaaaaagatgccaccttgacgcagcaaaaacaataacttgccttaagcggcacctcccctctcctcctccccctccccccaaccaggaggaggcttactttgacaacggcggcactctgagcacccgcctatacccaaccgaggctgtaaagtgaggaggttcgcattgtaaatcagggactttagacaggtcccctaggcaggcgtttgctatgaagaagcacctacctgtactggccgaacagctattgtcagtattgtggcacttgttgcgaagctacatcagcctgagtgccctctgctgaactccttgctcagaagagtgaagctccagcgctctctggggtctgggtatggtgacccgtaaatgccacacagttttcggtaatctgtttcgaggttttctaggagatggagatcttcggcccatgcaaagctgcaaaggattgaatgtcattcttcgtcctactcttccgtctcttatttgacctcagccgtatcgcaccaggggaatgtgtatcaggctggttcttcaagcgaaaggagcggtccaacgagccatgacaccagctactcccgatcttggttagatccggccggctacttttcgatccaggcaagaggaagtcgattgcagcagtagaggatagcatgacctaccagtgagctggcgacatgacgtataagaatacgaactcccatctctgtaaggtacagtcacgttcatttcttctaccgtgtcggagttcacgggcagactcgaaatctcgcgcctccgaatcttactccaacccctcgtgtctagaagttggctccagaatagaaatggtgtacacagtccagctttgagaagaacagcgaccgagcacatcgtcttggaaagttgttcccatgctctgtcgcgaaacgccgcacgcgatatgtgatcgggattcgcaagactttaagcactatgactactggctactggtaaacctatcgatacagtcggtcttatcgacctcgtctccattcgttctattatgcgtggaatcggggacgtcctgctaacattataaatggcctttgctcctggcccgccccaaggttcccctgcggacctttccctaacctagcacaccaagcgcgccagcacccaccccgacagcgatccccgtcaaggcgtatttccactttgtcaagccatctctcagtgccaaggcgcccgaatcagggttttgttgcagcgtaccaccgcccgccgtcatcgttgcaggtcgggtgaacgggatggacgacgtcaatgtctatgatcgtgagatttcgtatcagtcggagcatagggtcgactcgagagtggaggtgtggggctgggcacacttaccttgacgacgacgacctgcccgttcacgggatccgtggacgtgacatcctctgtcagggtgactacgacgataccaccactatcctcggtctggccctcggtagccgtgagggtgatgatctcggctgcgtcgcattgacagataggggcggacggacactcgatcagcggtccagtccctgctcaatcacgaaggagaactcaaaccgactcacgtgcgagtcctccaggtccagcagtagcggtgatggtgaccacatccaccccttgactctgcctcgtcaccgtcctcccgctcgcgtccacctcggtgacgggggcggtgacgtactgggtgacgaccccgacgataggagccgaggtgatcgtcctcgttcccgggttcccggccggagcaggatcggggttgacactggtgctaggcgagaccggggccgctgtcgtcgtcgtacccgctggattcgggttttgggcgacagaggtcgtcccggccggctgaacggtggtcgcacggctggtcgctggagtcggtgtcgtctcagaccccgctgcttgtccatttgacgtcgttgtcgtcgtcgcacttccaggtcctaccggactcgtcgtcgcctatccccatatcattcgactcgtcagaccctggagcacgatttcgaacacccaatcccggaacctcaacaagactcacacttcccgctcctactgtttctgtatccccgcgtgtgacgctaccacccaccgtcgaaccgggctggacggtcgtagacccatcagggacccccgaggaagacgccgcaccgctcgtcgtccccgcactctccgcgggctcagaggttgtaccccctgttccgactacgatctcgctcgaggtcgaggcggagatcggatccgtagtcgaggtggtaggtgggatggatgtcggggctggactttcgtcggaagtcaccggtgcgagcgtcgtcgcggaggcggtactctgaggtacgggttctgtcgtactaggagcagcagaactcggctgggggtcgggaacgactgatgaagccgaagaaggtgatgatggagacgacgaagacgatggagagggtgctgcggcaacggaagtcggttcgctactctccactgcttcggaggagggggaaggtgaagcggctgtcgagctcggggattccgtcggggccgaggctggggaagaagtaggttccggtgatgcagaggtctgtacagatgtacgcaggaaaacaggtggatgaaaagaggtagtgaaagagttgcgatagtaaagatcgcatgtcatcacatcatcagcttgatctcgttatcagaggtcaatcccgacgctcaccccggtttccactgtggcagtcgcaggcgtggttgaacccgcagcacctccctctgaactcgtttcccctgatactgtttgggtgactagggggtttgtccctgcgacggcggtggtggtcgtgaggttctcgacgtcttgccgctgcactaattgtcccgtgtgagcgggcgtggccaagaccaggatgttcgggcctagcgagaggagtgggaggagggcaggtaggatgcgcatggtctgtagtaattcctcaaaactgtgttcgttgtcgttgtcgagtggcttctattccacccggagtacatctaatgttgaggtggtcgtcgtaacctgggatgaggtcaaatgtcggaatgggaacatgggaatggatcggccatttcattcgatcaattcattccatcaaatcgcccgctccgctcggctcggctcggctcggcatctcaatttcccagaaaaaacgccacgaacacagcccaggcttggaatcgattaatgaaacgtcatacccacgttgtaagtgaagcatcacgtgagaagtgacgtgatgtaccgtacgtttatagtcgtgggttgattacctaatcatccaaggggcttcgacggacatcatgatgtttactttaccgcggtgatcgtctcaaaccgatgtccgcgtgaatttctggaggatccccgtcgaaacgcttttgaccgagccacacacacaaatgtcatgatcaaccaatgtgctgcaataagaattccctcttccgcccatcatagctccatcgaacaaccgcggaaaccgtttcgattctgtacgatgacgcctgtcgcttcaacatccacggaacagcagaaaaagcgcaagaggtctaagcacggtgggaacgccgccgcttcgacctcgacctcgaccttagaggcgagcgttcccgcgaaaaagtccaagaaagagatcaagaagcgtcagcccgaggccgtcatcactgaagagcaacaagacgtcaatgacgatgacgatgacgtgcctgagcaagcagaggaacgagctgcggccactggacctcctgccgtcgaggctatggacactaccggccctgcctctgccgaagccggcccttcgaccacgacggccgggaccgctctgacctcgcaaacgttcgcctcgctcaacctctcccctcagacccaagcggccatcgacgctctccaattcagtaccatgaccgaagtccaagctcgaacgatcccgcccctcctttccggtcgagacgtcctcggagccgcccgtacgggttcaggcaagacgctagccttcctcatcccctcgatcgagatcctgagtacgctcaagttcaaacccgccaacgggacggggatcatcatcctcaccccgacgagggaattggctctgcagatcttctccatcgtcagggacttgatggcagggttccatagtcagacgttcggggtcgtcatgggtggagctaataggaagagcgaggcggataggttggccaagggtgtcaatctgatcgtcgccacccccggaaggctactggatcacctcagggtgggtcgtcgggagaagaggacagaaatagacctgaatgaggcagagtggtactgatacccgtcccccccttgtgtcttgtccgtttttcgccccaccgcagaacacgaaatcgttcgtcttcaagaacgtcaaggcgctcgtcattgacgaggcggaccggatcttggaagtcggtttcgaggaggagatgaaggagatcatcaagatcttgcccaacggtcagtctctatcaccccctcccccgtccgcccctcccttgacacttcttctctgttcaccatgctgatccacccgctctcactttgacgtcacgcgacgcctcgagtagacaaccgacagaccatgctcttctccgctacgcagacgaccaaggtccaggatctcgcccgaatctctctccgacccggtcccctgtacatcaacgtcgattcggacaagtcgacctcgaccgcggccatgctcgagcaagggtacattgtcacggaatccgacaagcgcttcttgttgctcttcacctttttgaaacgaaacctcaagaaaaaggtcatcgtctttttcgccagctgcaacgaggtcaagtattacgcagagttgttgaactatatcgatatccccgtcttggacttgcacgtgagtcgagtttggatcggggtttgcgggtcgtcggcgggtcaccgtcatcgaaaaggtcgtgagctgatctcaacccactcgctacccggcttgcaaccaacagggcaagcaaaagcaacaaaagcggaccaacacgtttttcgaattttgcaacgctccctcgggtcacttgctctgcaccgacgtcgcagcccgtggtctcgacattcccaaggtcgattggatcatccaatttgaccctcctgatgatcccagggattacatccaccgggtcggacgaaccgcccgagcgggaaagagcggcaagagtttgctgtttctcttacccagcgagcaaggcttcttgcagttcttggccgccgccaaggtccccttgaacaagtttgagatcaagcccgagatgatcgccaacgttcaggatcaggtcagtccgagatgcccgccctttctgtcagacccgctggcatatcgtgttgatcacgcttgactgaccgattcgcgccgattcgcgcatgtcatagctcgaaaagttgatctcgaaaaactactacctccatcaatccgccaaggacggttatcgatcgtatctccaggcctacgcttcctactcgctcaaggccatctttgatatcaacaagctcgacctcgccaaggtcggcaagtcgttcgggttcgccatcccgcccaaggtcaacatttcgatcgggacgtcgttaaagtcggggaaaaaggctagaaaggccggcgaggatagcgacgattcggacgaggaagagggaggaaagcccaaaaaggcttattaccgctcacaacatcagaaccggaaacgaccccgagtaggcggcaattagacgggcgatcggttcgtctccggcccttgctcgtgttatcctggatttcctacctgttgtgctttgtatctgggggtactttttatatatatctgtcatgatctttgctcgcgcctgcatccgtctggcgaatcacttgcgacgacagtagcaacccgagacaaaggcacaaggcattcagggctacagagatgttctgatcctgtgttgacgtctggagattgactaaaatgtagagggggagtccagtccgaagcggaagcgtcgtcggccgcgaggcgtgcatcattggtatacatcgtgtcatggtcgttacaagtttcgtttgatgcattataacggtaaattctatacaaccatattgtgggggagtggcagagctagagtggcatctgagcctaaatgagcgacctcgtcttgtttgatgaggtctttgcccagccgataggcggtggtcctatccccagacctcactcattcttgatcaatcctcgacagcccagtttgaccgcctgccaccgggtcgtccaccagtgcggggcacccggggtcttggtctcgacacgaaccgacagtctccgacgactcttctgcttggcttgccagcgccagtaacggattagcagcagcatgccaacaaagatgacgctgacgatggccatgacgacgaagaatagtttgagagggcgacgtgaaccatcgtcgcgacgagcctcgccatacagcccagattcgggaccgagattggtaggtatatgcacgttgatactgaaaagagctgtagagcgggtcaagccatgctcagtaaggttcgcattccgcttgcgcaaaacgagccagtgtcgcaactcacatgtcacgaactgcatcggcaggtagccaactgtaacgcaggagagtgcgagaatcatgttggaaatgtcgcctctcacgatcgagctcgtgacaccgaggtaagacatgtatgccggttgacagtgggacaagatgtactcgtagtgatttagggatgtttgtaacatcaagatatgatctgcggtatcgcgatcgattcagcggcgcgctcttgtttcagtcgggcgggcgtgctctcaccttgcacgtcccctatgtacgctccaacctcgccattctcctcggcagcccgctttttgagccgtgtgacaacttgatacttgcttcccagcaatcgagtcaaacccgtcgtgagcctccgcaattcagtgatccgcctcaacatgagcgaacggtcaaatactggccggaaagccgcgtcacggttcggattctttctcctaaagtgattcagaccgaggaaaagtaccagattgtgcatcgcttgagagggcatacgcaacatggcaccgagcttggtctcccttcgccagagtcggtagcgcagtcgccacgccgcgaaatgttggcccggaaaggtcttgatcgtgcgagtgagttcggcaagcggtttccacgtccgagacttttcctttttctggtaccaagtcttttcattggaagccggaggtgatgatcgatcagacaattcgatcccgttgctctgagcaagagtcgctttgagatctgcctcgaccagacccggtcgagcacgttccgctttgcgcggcttggtcgcaggatcgatgacgagcgagtcgatttcgtccacctcgtcatcaatatggccgatgagtggaaagaaagtgtcgacgaccgaatccatcagcccgtgtgcgatccattctacatccacggtcggagtgagcagtggtcgtcgagcacgattttagacaagactcaccggcgttcgtcgattctttgtcgacggtggaaatcttttccctaacacgatcgatatgcttcgaaatatcaccgaagtggaactgaaacgtaggtcgttgttaaccgtgagaattctcttcgaaggcttgctagtaaatgccagacttacgctaacgataccatctgcaaacacgactagatagatgttgataccgccgacaccaacaccctccaatccttcctttcccggattgtcttcgacgatctccagtttgcccttctttcgaccagacttgctggagggtgtcgacttggcgttgcgtttcgaagtgggcaagaatccgccgggcttcatcaggctcgcaccaacgtccggtgcagtgtatttgaagtacgtctcgtcgatggctcgaaatacgattaggtaataaccgaggttctcaaagacgtctagcttctctcgcggatcttgttgcaagacatcctccaaggtcaagggatgtaggtggagaagctagtatatcggtcagctggggatcgtgaaatcgaccaatacagcgcacttacctctcccaaatctcgcaaatcttcccagctaggacagctcacatcgagccaccagcaaccttctttaccgagcttccgcttgatctcgatgtcatctacagacgtttcaatagcgcgcagaagcggaggcgggcgatggatcgtgggcactcccgtttggccgcgcagcaaagctggccgagggacgggcggaaggacaaagagcggagctttgctgcgatgtgcgtgcgtgtgcaagtgtgatgaactgtgcgaacgcgatacggggtcgcgattcatgccgagcaagtcggaggcggatttcggtctgacaatgtccgccttggtagcatccgacgacgttgatgacgtgttgctggtctcgtcgacattgccagctccagatttgcccaaaccgacaacgtctgtcagactgttcgttcgtcgtgcaacagcaggatctgaaccgaggtcgccttctagaccgaaatcggacttgatttggatcagtcttgacctagacctgcctggcctgctgcgccgctgttctgtctggcctgacgcactgccagttggaactccagtagcagggggagaaggctcgggagtggcaaccggtgtatcttgttcggtcgacagatcgatgatagcccgcctctttttgcctcctcctgatcttctctctacggcgtgaccaagcagactgtgcgtccacgaactggcacgagagataggattcctactgagagtcactcccgtcacgggcctgtcgtccgcccgaggcaccatctcgtccagcgctatctgggaaggagttcgagatgcgaccggttcttccttttctctatcgctcgtcgtgtctgcgctggacggacgaggcctctcgcgatgtcgaccgccggcctcggggtctctgtgccggtgatgatgacctcgtcgtcgtctcctttccctttcccttcgcctagccttttccttctccttgacctccctttccctcaagaaagccgcctcgtatcccgatttttctctttccttcttgatcctctccaagacttgcggcaaggacggagtagtcatcaacctggacctccaatccggctgcaacgcatccccttcgagcgcaggtgggggtgcaggttcgttcgggtccagcatgggcgatccaacacccccgagtgctgaggatgcattcttcctgcctgccaacctcgactcgggtagagctgcgaacgccacgctctttcccattaaacccgcccccaagtcctcctcctcaccgatagggccggggagcatcaaactaaactctcgtcgcgtagggacgatcttccttctcgtgccgccgactgtgacgctcctatcgggtgacgagctccgggtggcaaaggaaaacgtcctgctcctcgccctacgtcctcccgtcctcgctttagaggaagatcgacgacgtgtactgccggtcctcgaagaagctcgtttcctcttgtgtgatctcgacctcgagcgtgagcgtcgtcgcgactgtcccttttttttcgcacgtcggtgatgatgaacgtgcccgcccaccgtcgagccggggcatccggttccacacgagaccgtctccgcctcgctgcctgttccgtcttgtccggaagatgaggacgaggatgatgaagatgaggaagacgaggatgaattcctcctcctacccagagcgaaatcgaccgcccgcgtgacccgtcttccgatctccatgcccgaggacgaggatgacgagcgggacgatctggatgatccgctcgagccggaagaggaggacgatgaagaggaggaagacgaggaagaacctcgtctgaaatacctcctccttcgtctcctccttttccctcccgatcgggacgagccggatgatgatgaagaagaagaatccgagtccagtgcactttcccccttgcccgccttttcgtctttggcggggaggggaaacccatcccttgtctcgggcctctcggttgctcctcgaaagacttcagaggtctcggcgtcgtaccagccaaacttgttcctcccggggacgagtgacggctgcgtctccctttgcgtttgaatggcagactcttggttgggcgctgcttcaccagggaggacgagcgggtgtatcgtgctcgacgtcgcatgactcggcaatcccggtctgagcgagggggaatgaaagagctgttcggcaaacatcggaggtccgctagattctctcaatctgggagaatccggaccctgtcgtccacgcctgtgatgttgatggctgcttgccgaggtcaacctctttttcttgccgttcccatgttcccggtcgaccttgctattcccggtagaagactgcccgagagcttcctctacggcgcgtcgggacgtcttgcccaacgaacctcccgtccccgggaaagccgcgctggtggacggcatgttcgtcgcatcgtcctggaaatccttgaccttgagcactgcaggcggggtcattttcagcccgaacaagcgacggcttcatgtgtttccgatggccaagacgatcccgtatgtgtttctgaggatgatgggatgaaccttcaagtcgacgtcgatcctgtaaccgtgtctgatgtcctcggtatggaccaccgtgatcgtctcgcctgcatagatccggccggaatcgaatcaaaagtcctttgtcggcgattcgagcgagtgacgttcaggcgacctcgttggcacctgttccgacgatttcccgcggctactacgttctgtgttcgttctttcctctcgtcgtcgggtcgttatccgaccccttgtttgtcgccttgcagaggaggaccgtgatgccggtcgttctgcatccaacgacgatggtcggtcggatttccagtatcctctgggattcaatgcctagacatgttcgatttgcgtaaaagaaaagagatgtctgcgtggtatctttctagctgatcgttgaccgttgagctgtagagttccgaggtgtttgcgagttgttctccgaggaggatgctcgtctgactgtgactctataataggacgtacctctggccgtggattgaatctgaattatttgcggccgcagagagtgagcgagtgcgagtgtgtctgtgaacgtgcgcgccatcgtccacaaaggggggagcagtggaggggccgggcgaggaggagagaggcgacgcgtaattaagatggttcctaaccagagttctatagacacatttcatcagccgaagggatatttgcacagccatccagctaagacgcatccggcttgtaccaccatagtcgagtagcgagtagctagctggctacatcgttgcatcgtgagttaggaaaccacacgatgatcgagggccgtttcgagagtctggatggtccagatcgggatcacatcgtgcagccaccatcaaggggtcccatgtggatcagaaggtattcttattattattatctcatcagaattcggcacgatactggattcgcctttgcctattacaaaaaaatcttgcatctcgactcgcacatttctcattatgcacgcgtgtttccgactcgaaaaggcttgcttgacttgagcgtgcgaccggtttttgacgtgcagccattattgaaaaagatgcatcgattcgagctttccactaatcgatttccttagacgatcccaccgctagcctgtcgttgacctttgccagggggaggtccagcgggagcctggtacgatcctgttatcggggtaacccacatcggtcgatcatcagcacgaagacgtatttccacgggaaccaccaatcacaccctgaggctcaccttgctgaccggtaccggtgggttgaacggccatatcgtacccgggcggggcaggctcgccattcccagcggccgtacgcctcgcctcggcctcttccgccaacctattctcctcggcctgtctgtactcgtaatcatgcgtcgtgtcgttgttggcagtagtgttgttctgaccgtaagaatacgtcccgccgttcgatccgtaagcaccggccatactaggggtgtaggcggcttgaggctgtttgacgggaggtgcaccggggggaggagcgtattgctcgttggcctggtttccgtacgaggaagggtattgagtgttgttgtagtatccggtagcgttgttgttggcgttgttgtcatagccgttgttatggtatggcagtccctcatgctggttgttctgcgtgtgcttcttccatgcagacatgattcgcctggaaatcgtgataacggacctcaattcccatttcctgtacttgcagcaccagtgtcgacactcactttcgcctccagtagctgaacagcatgaccaaggcgatgactcccacagcgatacccgctccgataccccatcgagcaccggtggaaagaccgccacggtcacactcgtaaggtcgtccaaagtagtaacaggtatctgctcgggccgaaggtaaggccatgatcagggccaaagctccgagagcggtggcgggcgagttcgatctccgagtcatattctgttgaagtgaacccgagctgtcagtcgtgtccctgccgatacaattctttgcaacattactcactgtgttgatgtctttgtgagtgatagaatctggtgtgaatcgactgtttccgtaaagatgtgtcgaagctcgcaagacttggttgggttgatatgtagggttaagaccttctgacgaattctctgagttaggacgcgagcgatatgaagcagtacgcgcggatggccagagaggcgaaagtcgatgatcgggaagagagtctttatcggtccgtacagcttctcgaatctcccccggggtacctagcggcgaacacagcatgggacgaacgctccaaccccccgttcacccattagcccggatctcggccttgcccttggctgctagctcgatctaccgagacttggcatttccagtcggggcgttggtcgcgtgaataactgcgcatgagaaatgacgtcagggtggattgacaaagggactcgaaatgattaatacacgtcatttgggatttaattcgatacggggattgacattattggcgcagacatcgatcatggcggtctactagtgaggtcggccccgcagagacccaggaccgcagagacccaggaacatcccgagtcatcagttagaagtccctatagccatgttgacatgaggatactcggatccgctatagctaggagcataggtatctctgacgatctcctgttctcactgaggacagactgggacaccttcccggcgcgcttcctcgaaaatcatgcgagatggcgtagggagaccaatcggccagggcgtgttcgctaaagagacccaaacttcgtaaggcataaagaatgtaataacgtaatttcattgacaaaagcgaccgtctgattttccacaacccccagaaaaatgtcttcggcgctcaacgcctgacgctctcggatgcttttgcacatctcccagagtcttttgcgccatggctacttcgtctaagcgagctgcttgatggcgaagttgtaaccctgggtctgggtaccggtggaacggggataggcaagatgggcagcgttgataccgtacccgtgagtagtgtcgcagacaccgtcaccctgcatatcggaggatataacggtcagccccgcgcctatcgcaaggatagtggatttcaaacttacgtagttgcaaacgtccaaagtcttgctgacccaggccgagggaatacccccgccaaaggcggacaatccgttgacgaacttggtcgaggtacctccgttggtgtcgacgttgcaggccagaccggacttgtgctcagggtttccaatgaggaagacacccttgacagcgttgaaagaggctccggtcaacctctccaaggcgttgacggtggcagcagctccctgggagtaaccctccaagtagaagcagtgggtagggtcagaggccagggtcgaggtgaccttcctgacaatgtcggcggtaccagcagccgagttttggctgaagtcggcggcgtagaccgtgttgtagatctgcccgcccgagagctgagaggtgatacgcgagttgatggtagtgaacccggaagattgcccctgaatctcaccagtacctcgggtgttgatgatagtgtaacgagggcaagtagcggagacagccctctcggtgaggacgggagaggcgacgcagctcgagatggcgcagccgagagcgatgatggtggaaatgagcttgaccattgtgggagattgtgagatgaagtagattgggaaaatctgagggaattggaagatggtgaggagtgattgacgagactaagaggaagatggaaagaggccaaggcgaccgtctgaccaccattatatactcttcctcgtcgcatgaaacgcatacccttcaccatcgattaccggtggatcgagaatacgctctcaacttttggcgaatagggttagcgccggaggctattgtctgggcaaggtttcggtcgttagcgtcgaaagggataaattagctcgcgcggaaaagggggaagacgaacggggtcgccgataatactccttctcgcgttcaacctgctgttagctccgccaactgtacggcctcactcagcatccggcgtctgctttcgttggagtcccgtggtccgtgatcgaaataattgaccgtgaagaccaacgtcgaagagggcaggaccccggtcaccaagcggatcgtatgctcaccctaactttgcgccaactgcgagaagcaggaatgtggcgagtcggtgcctgtaaccgtttttcgatcggctggaaccgccacttgcatgctgtcgtcctggaatgacatgatcgaggtcgcgatggaacgctgttgcaaggcgaggatcaaggaacgtggccacccgttctatcgattgcaaatcaaactcggtagtgtgtatggcgaccacagaacacgattcgccaataaccggtatgcttcgaacgctgtcaccgggttttcagtgacgactagtgctcgggctctcaaagttgttcgcgatctcgcagtttgacaatatcgcctcgaggaccactgatggcacgtttattgggaaaaggccggctttccataccacgattttcacattgccttccatctagtcgctgtccctctcaaagcgaagtaatcttcgcagtgaagggatgtcaccatgaacacggcgagcagcggttgtcatctgcccgtgatacaccgcgaaacgggatatgtatatgttgttgattgggtcatcaagtcgacaaggatggcacgcaagcgttgattagctttagcgatgtatggtgctaattaaattttcttgcggggcgcttttcagtcgagcttatttggatcacgctcattaagcttatcgctcgagccccaacgatccacatcacgggggaatcgtagctgtgcggttgcatttgacagcagggaaacatcttgcttgtgtcttcacttatcattgcttccaaacagataatgacaacggagtacagacggtcgactgaacaagacctctgcataacatattgagggagatcattctacaagtgctcaggccttccctagatataggcattccttcgctcaatttcccgccaatcactctgattcatgcatggcattcgtggtcggcccgtcctcgacacgggatttcaccttcgtgttcgaggtgtggtcgagcagtgcatcagcaaattcagcaatcagccgtaattgcggagcgatcaaaacgcgattggtgtttcatcacggtcaccaatcactactgatcacgatcaccgccgctctgaaaaaggcttggcagatactgtacccccgaaccccgccagacgaaacttgcctctgaaaggctgctcaaggcaggtgtatggcagccattgggctagctgaagaccctgaactctacgtaccgcagctcacatcaggttaagatcgagtagacgcccatacgctcgctcgataccctatcaaccaagactgttgacttatgctgatgagtatcaccgttctccaatcgctagttcgggcgggacttcccgcggtttcgagtcgacgggtcatgcgaggcgagctcgttgtgacggtttcaaacgccagaggctggcccggcagaatcacatggaagctgatcgaaatgcgaaaggatgcctttgagacggatcatcaccccggtcgtcgtgttttaaggacttgaaacggggatcctttcgatcacgcgcgtcaacaacgcttccgcatggggtcagctcacggctgcggaccaacgacttgattaggttggttggcggacaacggaaaggtgcttatcaattctggtcgtctgtcacgcctctcctcctgtgccttctcttgtcaacagacctcttcccgtggggtttcccggaccgcgtgatgtcgggcaagtcccggggtcgggaaggctagcgtgatggcaacgatgatatataaactctcgacatgcgtcgttgcccatcacgagttctcacacctccatccggcacgtttcttcaatttccttcctcaatcatcccaagtccttgctccttgcataccctagctccgtaatacaaactcacaacttgctcaatatgcgattcaccgtcattactatcgccgcgctccttcccttggcatcggtcagtctgattcgctcgatcccatcagaattcacccatcaccctaggtgcaaaatttgatgtcctttcttgtactttgaatcccgacaggccgctctggtctctcgtcaggctcaggcagagccccccgtctgcgctgccacctgtttgacctccagtcttaccgacacgtgcgctgatctcatcttcgctcgaccaaaggaccttgcttaagtagtactgataaccaccaaccttcctctctgttctacagcggggactgtgcactcaccgacactgcctgtatctgccagaaccaggccgtcatcggtgccatcttcaactgtatcacctcgagctgccccgtgagtcggccggtggcttcctgtacattgcagtgaacagtccactaaccggcttcgccgaactcgattacaggaatccgaccgtcaagcggcctctgactttggtgctcaatacgtaagtgtccgagcgtacctcgtatgacacctggtctgctcactcaccatatctttgtcaaagtgcactgctgccggagtctccgtcgctcttcccggtgccacctcgaccgccgtcgagactgccaccgccaccgagacttcggtcgccactgttaccagtgacactgctgctctctccagcgcttcgagcgccgctgatagcgccatgtgagcggcttcggtctcggctagcaaaaatatctggtactgatttcaacttttgtggactaggtcctcggcttcggatgccgctgcgagcgtttcgtcctccgctgcttcggtcgccagctctgctgctgctgctgctgcgtctggtgctgcttccaggtaaccgtcctcctaccgggtcattggtgctggacaaaagactgactgtgactgcttacgtcctgccccacagcatcggatcagctgctagctcggccgtggcctctgctaccagcgctgtcgccaacgcgggcaacggtgccactggtctcaaggttcctgccgctggtctcctcgccggtgctttgggcttgatcgtcgccatgtaaggtcgatatttatcctcgcttcccgaacgcgctctggtccagtccagatggaccctctcctgtccttcattttcactctctagtcctcctaccgctcggagctttcatctcgatgtcatcttgctcgctcttttgtttcgaacgtatatttcacactcgttcccatccccgtttacgttcatggttggtaccgtttcatctgacggatcaaatgacgaatgtctgagtcggcctcttgctgcagctcgcttgcacgatcatgcgttcgtcatagccacacctctctatccctataatttggctgatcccacgcggccgatgaggtaaggcgaatcttcggctagacacgccgggcacggggaggaggggcagggaaggacggggaagggtaacgcgggggcgcgagggcagcgagcaggaaggaggccgagcggtttcttgagatctggcaatttgctccaaatcccaagggaatgctcatgtagctggtagagaacgtcgagttttgagctccaatctatcgaaaactaccagacctttcgaatacctacaggatcttcctacctcttaaaacgacgtacgggagacttttctgatatcattgaatcaaacgatacactaccggacttgtaacagcacaactcgaccgaccaagccggcgacaacaaaggaatcagacaggacagcgaaatatccagtcgaaccagccttgtctgtgcccgtcaaaggaaagacaaccaattgttgtcccgcattccgctctcaccgttctacctagaagacaagagtctcgagatacctgaacttttatatctggatatatagaccgagtgagtcgagttggagattcgggcagcagtcgaccttatctcataccctttgactgccctcatatcaaatttcgtatcagctggtatccaagcagtcttcaacatgtctcaagctcctactcgacccagggtcagtctttccacgagctttgacttatatagtgtagaaagctgatgatcgataccgtctcttctcgtttgcgtattgcgacatttccgccgacctctccgttgcccgaaactttaccgtggtcacgtacagcttccgcaatcgaagtcggtcttgtacatcgatcacccggtcgatcatcccacgccgagtggctctcgagctccgtctccgagcgggcctaccgactcgcttcccataccctcgtctgaacaccagaagaatggggacgggatcgtgcccgtccgagtcccggctcaggcggtctccgactctcccctcgatgagaaattcatccccatgcgaccggctgagaataccaacggcagtgaggcgcccaaagaagaggccaagaaggtggcagccaaggcagacgaagagcccagtcgaccagcgatgaaccatacggcttctgctgccgctgttgtcaatggcaacactggcgcttcagctttgagcaacggatcgcccatcgtacccaatgttcatgccgaggctgaagaatattacggaggaaaggaagtcgtgaacaggagtcgtacctattcgatcgtcagtatccataggacttgctcatgtctaccgaaacttccccagctgacaagtcttatcgcatataggctggtgtcgaggctcattcgaagcgtcgaccttggttgactggcgatgaggcgccctcgaggaacagacgtttgtcgcacgatgagcagtctacccgagctcctcgacgattcttgatcgacgtcgaggagactttgaggatcgtcctggagcaggaggacacggacaatgatttccaggtaagtcgacggtagtcagtatggtagcagaacaagaaagtcgatattcaaatcatggactacaccttgtagatctctgcttacgacgccgggcctaagctcgtctcattggggactgccagctcgaacgcctacaagtctttcgacatcagggtaagctacggtcttatatccttcgcttcgattaccgtgactaatgtgctccatgacgaatgtagggtcattacatgctttccaacttgttgcaagaacttgccctcgcccgagactatggcagaaagcggatcgtcctcgacgaggctcgtttggtcgaaaaccccgtggaccgattgtcaaggatgatcaagaattcgttctggaatagtctgactcgaaggatcgacggggatggtttggagctcatctgtgcggatcccaagaacaggagcaggaacgcgaagcctttgatctacgttccgcacggagagcccgagatggccgagtattaccgagaagtgtgagttgagcatctcattgggtcagtgcacgcaaatgagctgactcgttattaccttgtcctcacagcgctcgtcagaagccatctcttggacttcaggtcgagactctgccgccgaaccctgatgacccagagttcgtgaaatcgctcaacgaaaggcccggtatccttgccttggcgatgaagcgcaagacgggccgggatggaaagcttaccttcgagggtattccctttgtcgttcccggtgctcggttcaacgaggtcagttcgggctcggctgtcgcaggttctccatgtcgttgaaccttctttcgcttgttctctagttctactactgggactcatacttcaccgggctgggactgctggtggacggcaagagggagatggcgatgaaccacgtcgaacatttcatcttcgagatcaaacattacaacaaggttttgaatggaaaccgatcctacgtaagtctactctgatctgttcctaatgggcggcagtgatctcactaaacggtcgtcttgtcgcagtacctcgctcgatctcagcctcctttcgtcaccgatctggctctccaaatctacaaccagatgcctcgggaagatcagccagctcacgtcgaatggctcaagcgggcaatgcgggctgccatcaaggagtaccacacctactggatggccgagccttctctcgatatcgagaccggcctatctcgttaccgtcccgctgggcagggtatcccgccagagaccgaagccacccacttcacccacatcctgcaacccttcgccgaaaagcacggactttcggtcctcgaatttatcgacctatacaatgaccgagagatcttggagccggatctcgacgaatacttcatgcacgaccgtggagtccgagagtccggtcatgataccacttaccgattcgagaagcggtgtgccaacctcgccacgatcgatctcaacgccttgctcttcaaagtcagtcgagctcgttgaaaacctttgagataggacatgatcgatactgacctctggatacatttatgcagtacgaacacgatatcgctaccgcaatccgagacatcttcggggacgagctcgatttggaggacgactttgacttggcgcctttccccatcactcgcgaggcttacgctgggaaacgagagaggtccacttcgaggaagcagacctctgaagaatggtaccgccgggccgcttttaggaagcagcagatcgaccagtactgctggaatgagggtcaagcgctctacttcgattacgacaccaaaaagaggaggcaaagccgatacgaatcggtaacgacattctttgccttgtgggctggctgtgcgagcgaacaccaagccgagcgtatgatgtgagcatttgagccgatcaatttcctgcttgcgggaggagctgaacatctcctcgcctcgattctcgcttactcttcaggcaagaatccgtccgcaagttcgagactgaagggggtctggtctcgggaaccgaagagtcgcgaggaaggatttcgatcgacaggccgaaccgacaatggggtgagtcaaagcctgctccctcgtaatcaatcatcctggctcatcgcctttactttagactacccctacggatgggcgccgcaccagatcatgacctgggttggtatggaacgatacggattccaagaagatgctcagagattggcgtaccgatggatctacatgtatgtcaggcgaacgcatgctgaacgcaagtcgtactaatgctcggtaataacttcatcttatgccaggatgaccaccgccttgtaagttatctaagagagcggacatccccatagttacgcagctaatgtcgattgccgtgcataactgtagcgtcgactacaacggagttgttcccgaaaagttcgacgttgtcaagctttcccatctagttgatgccgaatacggtaaccagggacttgacttcaagctactcaacagggaaggattcgcgtggacgaactgtgcgtacaggccggcgcggtcatgttgcgctatgctaacttgcagctttgacaccttgacacctcaacagcctctttccagatcggtctgcactttttgaccactggtatgaggcgtgctgttgcgaccctcacctcggtaagcgatcgtttcagtcgcccgacatttatgccaccttcgctcacgcaccgtacctgtcatacatagcccgatgtctacttccgactctcgggtcgcaaggactccaacctggacccactcgaagccgctttgggccgggtcaagctcaacaagcacaaggattaggccgagcatctgatctcgccactggcagtcccgtccgacatccctcgaaaagtcagcgcatcacattcctcatctacagcatctcaattccgtttcctttcccccatccaaaataccacacgacctgtacagtgacaattaacgccagaaaaaagccgcgtctctgagatatccatgtaccacctagaaacgactggcttggaggtggaaagatttattttacgcttgtgatcatgtagcggaattcgacatgatgaaacccgcagctgagcacgctcctctgataccgactaaaaggacactcttccacgaagacgtagtgcctgcaggttaaagatgcggtagtcctactcgtgctacaaacaataaatcctgatttggcagatctgcttgagcttgtctatttgtcaaacacgacatcttccctcttgcccaaccagggttatgtcctaccgcagtgatagggctcgaatacgaccaattgaagctaagcggactgtccccatctttcactgctcgcgccaagccgctgtcatcccttatacctcctacttgtcacgtaaaggcatctatggtcatccaatgttgtcacaaagtcattgagcagacaacgagcgaggtcattcgccttccaggacagcttgccgctggcaaggggcaccccgagcctagcataaaatgtgcaagaaaagtgtcgctggctcgtattcatactgctcctataccctctgatatgcagacaaggacgcctcgttccaagacaagaactgcccgctgagttcgcgcacttcgtgacctttgacggccagggcggcgatcacgaacccgggactgcgaggtgacgagccaaccgacgattgataagcgacgtccatgtccacgccaaaggttcgccagagggactcactcttcgggcttcaacagtttgccctccttgtaagccgtcgtgaacctctccaactcctccgggttcatccctttttcgcccaatgatcgaagtttggtctgcatctcagtctatgggaggtatgtgatgaatacagggatcgctcgtctcagcttatagagaggtgagggatgtgggagaagagatgctcacgttgaccatgcctgggcggacggcaaatgacacgatcgacttttcttcattcgcatatgtccggcaaagcgagttcaacgcggcctataagacgatgcagaccatatacatcgctgagtacgtgcggtctgaacagaggagaagaacgagacggaccttggaactgttgtaacaaccccatccggatgtgttccccgtagccgctccactgctgaccataacgaccttgcctcccgactcggcagtccgcagatggggagtcgcgtgttggagcatggagacgagggaaaataggttgatctggaaggtggatgcccattgagcgatggtattttccggctcggcgattgggcctgcaagaaatccaagcagaatatgaaaaccaggaagtatcagctcggcatgtgcagtcaacgctttccatttgctcgcacaagacttacctaaaggatcaatggtaccagcattaaggaccagcccgtcaatcttgccaaacttttccaatgcgaccttgaccgcttccgccgacgtctcgtcgctagcgacgtctccctgaacaaactcgatctgattccctgagctcgatgatttcagcgattccagctctgagggaatagaccgagataccgcgacgatcttggcactgaaggtggacaggagaatttgggtaatggctaaacctagtcctttggacgctcctaaggggggtcaggaagatcgtgggtcatcagtcagcatcccgcttggagttggtcggacggtcggcaccgcgcaacttgcctgttacgattatgaccggagaagacgacatgatgattatgactcaggaggatggtctgacttgggtatgtttctctgaagcgcggccggtcacaacacacaggtacacaggtgtataataatgaagatcatcgaattttgagaggccggctttgaatcgaggatgcacggtgatgcgtcatcttcgggcgattcaagctagtcgaggttcggacgaaccgaacgtggtcaggtcagttagtatgaatatatctcgaacacacgccacatgccacatgatagatgtaacgcccagctctatggtcgcctattcgagcccgactctgttcacccacacgacctctcgatactctagtcggatagaggtcagcatgagtcgtgttcatggtcagtgtccgggagtcgctgccaacccgataaacccgcgagcgcctaggagatgagacgagtcaatttcagttgcaagcgctcacctccgatcgaccgaaatccgaaatataaccctcgacgaacactcttgacttgcttatctcttcgacatattcaatcatcattacaactgatcccagctatcagaaatcagaaatcacacctttgtgacagcattgcaataatccacacaaagaatagaatataatcaagtcagaatggcacccctcgactacagcaattacctctcggacaagggcaagatggccttgccggacggtagtgagcagacgccgtcgagtcaggtagtcgaacttccggctgattttattcgctcatgcagtccgaggattgttccctctggagaagcattgcaaggtctctttcgtacgttcagaacctcgtctagacagcgccgatatcgccagtcagcttatcggtagactcgctccttcctcgtcagcttgccgggaagcccaacccggaaacgttccccttctcgtcaatgaccttgcatttgaagcctcctctcgaatctcccgtctcccttaagaacggatcttctagccaggaggtcaacgtgaacggcgacaagcgggccgacgggggtgtggacttggagatcgagggagcggatatggaagaagctcttcaatagtgagtccgcgtgcacattcaacgatgtctgtcatcggcttcatggctaagctctgcgtggcattccgaagctctgctactgccggcctccccggtctgaacgccttcctaacagagttcacctccaaggtgcacaaccgaccgattccccaaccttccagctcgtccactgcttccaagcccaagaactcggtcgaccctactcccgacccttcccgacctgcatctcctcaccaccctactcctagccagaccgcccagttgaagcgagagctcgagaaccaggctaccggggaggttaccagggaggaagtcaacgcgcttcgaggcgaccaggatgcctccggtgtgcaagaagtcccttggcgcgtgacggtcggaggaggttgccaggatctcttgttcaaggcctttggcgctatcttcaacccgggcgatgccatcctcgtcgagacgccggtttacgcgggggtcatctcgcagttcatgaccctccaggtggaacaggtcgaagtgcaggtagatgaccaaggggtctctccggactccctgagagacgtcctcgcttcctggcccgagggcaaagctaaacccaaggccatgtacgtcgttcccgtcggatccaacccgaccggttgttcgtcgacgaccgagaggaagctagagatcttaaagatctgtgtggacaacgggatcatgatcttggaagacgatccgtactacttcttggcggccgatctacgcccgtcttacttccagctcgagacgcaggtggtccccgagggcggtcacgtcgtaaggtttgacagtttttccaaggtgctcagctcgggaatgaggctcgtgagtcgatatccgatcccactccgcgtcgccaagctgatgagtagtcctgatgtcggtatcatctctttgcagggatttgccgctggtcccgaagcgattctgaaggccatggatacggcttcgtcgacggccaacttgcaacccaacggtgtggcgcaagccgtcgcccttcgccttttgcgttactgtgagtggcgccgttcactttcaatccgctcatgacaccttgttgacgcagtgtcgacaatcatacagggggtatccagggcttcatcgagcacggcgaacgggtcgccgctttctacgccaagaggagggacaagtttgaagcgatcgcaaagaagcacctcgatgggattgcgacctgggtatctcccgtagcagggtatgtcggtcgtcttctgtagacacgccggatactgagctgaacatcccttggatctgctcagcatgttcctatggatcgatgtttctcctattgacgactcgtccgacctcgtgcaaaaggaagctcgggagctgggtgtcctcgccgtccccggcttcgctttcttgcccagccacggcaagagctcgttcttgcgagtcagcttttccatcgtcgacatggacaacaaggccgaactaggctttgagctgttgagtcaagcgatcaggcagaggctggagaggcttcgatcggagggcaagatccagtagagatagccatcaggtcaggtggattgcaccaggaagaagcagattcaggccaggttgaacgtttcgcctcactgagcgcttgtatctgttttctcatttgctatttaatttcatcatcatttcaacttgattgatcgagctgggtgctcgtcctgcagccctaatcaccgctggtatacaatttcccaattggtagtacttcttgacgtactcgccttcaatccttcttggtctctgaaaattctctgagatcctccaaggagaccttcttcgtagcagcgaaagcggtcccgagcaggttgatcttggggacgacgctctttggctgatcgccagacttgtaagcgtccagggcttctttccatcgccccacgcagagacaccagcgacaaccttcggtcaatttggggcctcgggtcatcaaatcattgcctgcaggaggagtcaatttgaatctctttgatcagtcacaagggcggtcggctcacctcgagctttagagaattcgagaaaatccttggtgacgattccagcgatagtgtgatcaccgggatcattgacatcaggtcggcagtagctaggaatcaaggaagcgagcaagtttttaacatcgtcgactgttatgaacgcgcatggcagactggggcgtacttgtcgcggaaccatccggttacgagttctggacgaccgtgttgttgtaacttggtcctctcgactgcgagcgatgtcaatcagctccgggtcaatctgaaataaccgaccaaactaaccgttaatttcggaaggagcgatattctcggtagatgccatcctgctttgatcttgtaagaactgcctggcgatctgagcgtgtcgagtgaggtttagggcagatgcaggtcggatgaaagcgaggttcgcgagactgagcagtaacgccttggatgagatcttcataagtagattcgtcccccttgtgttacatctaccggctggatccctctaccgccgcccaagcagacgagtatcgagtgatgcctgatcgaggttcaaggctgaatggttgacgatcccctcgattgtggtcagctacggcctcgatgaatgatgacgtgatgaaagcttccgattcgcggacattgactcaaagaagatgtccgaaaaagcacccttcatatgatcaccctctcatgttgtgtttgtgggactggtgcatctcaagctgctatcaacggtacctacgaaatgtatgacaccttgcacctcgaatatacatcatcactcgtctaacctgtagcgccgtcacaaaatgagataaaccagactacatatcctcaccggtgtgttccgtgtagatcacttgcgactcaaagcttcctgccagcggacagaccatagtcgcgccccgcccgcgctgattcaccctcggaatcgtctgcaagatgtggatcgttcgggtagagacgctcgctcaggcagcgaaaaagggcactcaaggtaagtccactatccccgtttttcccactctcgttagctgacacaagtcgaaatgctcggatgcaggtaaaccttctaggaccaaattcgtcccgctagcggtcggcaagacttacaagctgggtagaggcgccgagaatgacatctcggtcgaccaccaatccgtctcgaaatcggcgggaagggtcatgataggtcattgggaagataaagccgacaagcaaggcaagctcgtacgtcgtccagcagggtccaaaaaaaagaaggaatagagcattcctctttgtttacgatgtgctgatctcacacggtgttgcgactgctcagccccaggtccccatcgaatactggaacgatacgcaaatcgccggttctaagctaccactcgaccaggtggaaaaggacgagtccaagcagaagcctgtcacggttctgcaccctcacgaagctactccaaggaacgcggaaggcaggatctcggacaaagccacagaggcggattatcaagagttgaacgaatggggaaagatcgagatcgaggatgggactatcatccagttgaccaagacctcaaagctgacgtacgtttcgtcctcgttcgaagacgacactgggagtctgtattgactctcaacgttgcttgacacaggttcacatggcgttcatatgtctttgcggataccgatcagacggccgtaaagatcgagttggcgcaaaaattgcgaacgtggggtgagcaggttcaaactcatcaacgatcatacagtgacaaccaataatctcattttggtattgcttctaggaatctcccatcacaaaaagttcctcccgggttacgcgacccatgcggttgtcccagagatcagcatctcgagcggcgcctgcctcgaagcagtctcttccgcaacctacatcgtccgctctaactttctggatcatatgttgaccgctttggagtccatatctcctgaagatggtgttcacttgccgaatgagatagagtacctaccggctatctccgctgttgacgctcaaggaaacccgatcaaggatgtccgtaccgatcctcaatggtgggaagcgaaaccgaccagacgacggatttgggaggggaccactgtgctcatcatcggaggtgccaaaaagtcggctgaagacgttttcctcaggaacggaggcgctactttgcattacctcgacgtgacgactcgcccgcctcgccatggagaggacttcaagaaaaaaatcaaacctttcctcactgctgctacaactctgtatgaggaggtcaaagaagtagtgactgagtctggcgagtggtcacgtcccccgatggtcatgctgtacagggaggaggtcttgcctgcaatagaagaaaagtgggagggcgaggaggactacatggatgtctttgtcggaatgccaaaatcgtaagattcacaagggccgaagcaaccaatcattcgctgaatacgtcacctcgacacagattgggcattccggtagagtttttgcaaaattggtggatgagtctgacgagacccgattgcatgacgatcttcgaggaaaacgaaggtgagaccgatgtgcaccgggattccaagctcgacgtggggtcatttcgtcttatccggtgtcgtattcctgtagaagcggcaacgcaaattacaaatcgtcctacgggaacgcagcattcaactcagccagcctcgcggatgctggctcgagccgacaccgagataccatcaacccatccagacgaagatgttagcctctcggtttctcaggaaagtactgagccagcacctccagctggaagattcgtaagtgcttccagatcgaacttgttgacctcaatgctcaccatctgcacctcacgcagccgttgaagcgtcgagctggagcgaacaagaaattttcgatgttcggggactcgtccagtgaagaggatgtgccacccgcaaagagaactcggactcaggcacaagcacagtcgcaactgcccagtcaagtgccaaatactagcatgtcgaggaatgggagcacggacaacgacagaggagtcagtgaaaatcaaagtctcgatccgatcccgatctcaaatccctcgacctgacttctttggcccttcataggcgaccggttcgtatcaggccaaaaacggtctgaaaaggcgggcaggtacgatgtctacgaataccttttttgactttgatgactctcggcacgaggacgacgaagcggaacctactgcgagcgatcctcttgccagattccgcgaactttacgatagcaacaagagcaagagcggtgttcccgattcgatgccgcctgacggaatggactacgaagagctgtatactcaggcgaaaagccaaacaagggctacagccggcacggctagtcaaatggaagtcgacagcagcaacaacgaagacgatgacggctttttagcccatttgaaacgaaagacgttggcggaaaagaagcagaaaaagtcgagggcgatagtggcagatattcccgaggaagaggaggaagaggctgaagaagatatgactcccagtgcggggcactcgggagccgccgcgcgatcaactacgcaagaagagttccatccagcacaagcagcattacctacactcccaggaaacgtttccaaggatgagactttcctgaaggctgccaacaaggtcaagaggggaagtaacaagatcgacgagtttgatatggagttcaacgcattgaagatttcgaagccgaccaaggcaaatcccgtcaacgctcccactatagcgaacagggtcaggcagaccgatgaagatttatacagattgctggaggacatggatacatcgacgacgggaaacttcatcgttatcgaacggatggatctctatcggaaagacaaggacgtgaatggcgcgggtgcaccggacccagcttgggcggggaagaagaactttaaaaagttcaaaaaggtgaatctggcggtcgtgggaaccgatagcgcctgcgagctgatctgtctccaaccctctgcagcaacacgtggcaaggcaaccccctataccgatgaccctaaagtcaactgtcgattacggtctgggaaagagtaagttttctgtatcacaccgagcccaagctggtaatgatgtaggctaaaatcatttttgcagcgtactgggcgaatgaaggtgctgcagcacccacagcggaaccgcctacgcaaagtcagatgccgtctgtgtctcagtcccaagcgaggactagcacatcagtctctcaagcgagtcaacccatggcgaaggggaaaagaaagctgttggcagccgattcggacgatgatgaaatccctgtcagaccattgcaacgcacggggaggaccctaacatcggcgactccggaaccgacgccagccgccactgctacgcggatacgtagaggccgaacgacgaccccctcggagtctgaagaagtgccaccggctaaaccgactagaggcaggaaaaagacggtagcagccatcccttcgatctttgaggatgaggaggaagagcccgaggtccagatggtcaccccgtccggggcgacaagtggtacccgccgcgggactcgagcagggacatctagaacggggacggtgctaggcgaatcgacgcaagctgaagtattcatgccattacgatcatccagcacagttgcacccccaacagcagctgcgagtggaacgggcacagggcgtgcgaaccgaaagcgaatgatattagcttccgatgatgatgatttggtgagtggtcgcgggtttcagtctgggagcgatcgccatggatggccggctgacaggtgtataatctgctgcgtttcgcttgtccgaacatcgctcgttaacggtgcgaaacagccaatactggccaagaaacggaagaaacattgagagtgcagaggctgcaaatccacataggtttctctacttgtcgtacgaatatgaccccgctccgacccgctgcagtgccattatcgatgccaagaagttgtatggctccccgttacagcccgtgcccgtcgcctcgtccttcagcttcggtcttcgttgaccctaggctgttactgccaagctgaaactttgctgccgtaatttagagttcagatgacgccacctttctatggttacgtgatttccccattcatcatcatcatcgtcgtcatcccccgcgtaaccctcgcctcccgtgagcgatcgagacgggcaaacgaggtcacgaggattcgagagacggattcaccgacgataccgaacctgttcttcagctctcacgaccggaccatcaccgtctgtctgtctgctgcttgtcaacacctgcattgcttagagtagctagaataggcatttggtagacttttcgccactgtctagacttacatcgtcaacccggtcaatcatacgtcgaactagactcttctgttgattgcctagcattccgccgtttacctctgcctcaaccttccacgtactatcaaacattcgccatgaatttcttcggaaagaaggcatccgtgccgcagaaggaggacccgaacatcaggaggtcatacctgtccaaggaattggtcaccagtcctgctgatggagtcgagaccgtcgccgatgttttgccgtggatggtacgttcgacttcagcatgattaatcgcctctcttgggtcctctgggttaatgacgggattttgatcacgcttctgcaggtcaagaagtatggcaacaaggtagcatgctacaaccgaaagatcgtcaagatcgtcgaggagaagaagacgatccccaagaagggcggggctgaaggcgagacggaggagaagctttggaagttgtcagtcgctgtacattttgtcatcctaatcgcaaagtcgctaatgcgatggccttgctcttccatcagtttcactatgtccgagccccaaccccacacttacaccgagctgaacgagagcgtccgtcggaccgcctcgggtatgcgtcatctcggtctcggcagggacggctggcgagacgaggacggcaaagagcgagtcggagtctacgctgagacgagcatgaactggcaagtcatgagccatagtctggcgaggatgggtcatccccttactacggcgtacaccacgctcggacccgagggtttgcaacattcgcttcacgagccttcggtcaggctcgttttcaccaactctggcttgttgggcactctcctgaaggtcatcgatgaatgtcccactttggtctgggtagtgtacgaccgggaagaggatgccgatcaagtaagtcctgctgctcaggggtcggggacgcctcgccaatgcttgaagctgatgtcgctttttgtgccttaaaacagagcattgtcaacaagatcaaagagaagctttctcaacgacgagctggcgaaggtgagaacgcgattactggaagcattttgggcatggaagaattgcaatcccttggcaaggaaaacatggtcgaggattccgtgtggaagcaagagaggccgaagagggaagacttgttctgcatcatggtgagcagtgattacttacatttgcgcgaccttggagatacgagatttctgatatcatggcgatgggcagtacacgtcgggttccactggtgccccgaagggagtcttgttgacccaccacaacattatctgctcgcgtgagtgctccggacaccgtctccgatccaatcatacagctgatccgctgtcttcacaatgaaagtcgccggaaccaagacgttgttgcaacccgagttccgcccggacgacttgttcctcgctttcctccctctcgcacacatcctggagctcttggtcgaaatgacgttctactttaccggtgttcccgtcgcttacggtaccgtcaagacgctcacccaagagtcggttaggaactgtgatggtgacttggtcgcgtacaaacctagcatcatcgtcggagtccctgcggtgtacgaattgatcaggaagggaatggtcaagaagattcacgagagcccttcagtggtacagaccgtcttcaactttgcttaccagttgaagaagaacgtccccatcaccggggccgcgctcgacaagatcgtatttgccaaagtgagtggacacaacacggattgtcgatcgacctatgacatgctcaaacctattcctaatcaggtcaaagctgctactggtggaagggtcagattgatgatgaacggaggggctgccttgagcaggacgacacaggaattcctcaacaccaccttggccactgctttgcagggatacggtcagtaattgacgtcgctggacagaaaatggcctgactgacatctacttttgctcgaaaggtgctaccgagacctgtggtatgtgctgtgtcttgaccccaggattcttccaggtgagcaccacttcacggaatactcggcatcggcccatattgaacaccctcatccactacagtactctacagttggatgcatcgtgccctcgctcgaggtcaagcttcacgactaccccgaggccgactacctgtctagcaacgaccctccccaaggagaaatttggttgcgaggaggttccgtcactcgaggctactacaagaggcccgatattaccaaggagagtttcaccgatgacggctggttcaggaccggtgatatcggacaggtaagtcgagactataccgcgtgtgagaggcaccattgctaacgacgttgtcgacacgcagtgggaacccaacggtaccctggccatcgtggaccgaatcaagaacttggtcaagttgcggtccggtgaatacctcgcgcttgaaaagctcgagagctcgtacgggagttgcgatgttgcgcagaacacgatggtatacgccgactctgacagcgatcgcccgatcgctattgtcgtgcctgtaagtttacacaagacgcgaaggagggaccgtgctgatggccatgatccatgactgacagcatgagggcaatctgcgcaaccacctgaaggctgctggcatcgacgtgcagggcgatctcgaggaacttgccagcaacaagcaggtcaaggagtacctcaagaaggagctcaactcgaccggacagaaagcaggactcaagggccccgagcttttgcaggacattatcgtcagcggcgagttgtggacccctgaaggtggtcagctcaccgcggccaacaagatccagcgcaaggtcatcgtcaagcagttcgacaaggagatcaaggtgtgtatccggtctttttttctcgtcgaccgagagagcatcgattgatggttcttgctctcactcaggctgcctacggacgatcgtagactggctctttgtcttcgaaagaccagcccgtgttgctcttctggaccagtctctttacttctcatcctaatattattgttatcgaccgtccgtctttgtgtgtaaaataagcgttacaagtctttacgaatcgagcacgatgacatctataccgtacatccgcatacttcgtattctcatttagacttttgtcattggcaaggttcaccagacctctctctccaatgcaggtcggccaagcggcatagatcagaaacaatgcctttgcatacaccaatgtcaagtcctttactggatgagtgcattgctttggatgctcaacgtctcggacagttcggccggcctgccgaacgacctggcgccccgcttcccccattcgtcacagcgtcgtgaacgatgatccaggaattaaggtccaattagcgactagctagtagctagtagctagtagcgatgagtaaggatagatctcggtgtgctccacagctgcggcgctgcttctcgagcgttgcaggtcgggcactgtttggcgcacatcgggaagcgcgggatgggtcagggtcgggtgtcgggttagaccaggtcggtcaggtcggttggtgacctcgctcgatgaccgaggaggccgagggataggctgggtattgctagatcatgctcgtagtgtatatgtcgcacccctgacggtccgagacgagggtgcacgtactatgctactcacgaagcagattatacatgtaaaggcaaccgggaagacgggaagcgactacacactacacggtgactcggtcgacaaaggcgaacattcaaaaggccgagatcgactcggccctggatggaggtgtcagtacggatcgttcggcacgcatcgagcacgtttttgcattgctaggcccatgaccgcccgcaaaaagatcgcctcggcagtacgtagcgccacttctgattttgctcggagaataccatgttccatcacgttcgcgcgcggaaggggagagtagtcaaacgtgagagagagggtcaggcggatcgcccttgtcccctctccctcccgcaaggtcacaagcttgttcgtcgatcgtgtctaccgcgcctccagccaaccgaaatgaagcgataataaccatggcgcaatgtgataagatgtaatcgtgatctagccagctattcagatcgacacgcaacatgtttctgtgcgctgtgaggcctgggctggtggtcaccgggaccaccgagtgcccctcccccgccccttccccgaaaagaagccgatctgatctgatgggatggtcgagcgatggtgaacgtcgagtctatggtcgagaatggcgcgcgcgggtgacggcggcggggcaattcccgtatttccctccgcgtttgcgtcgtacgcagtaacaaaaggtcaaacgaaacgaacgaggtcacatgatgcttacatgcaggcaggcaggccaggtcgagagcgaatccatcccatcattagaccctttcgaatcgccacgtccacagcccaacttgttgagcttgaatcctaacgatctagtttgtgtcgcacaaccattgacgaggaccagcaagtctaagtcgcccgctcgcaacgcaaacagactattcatcgccttacaactgaataattatcgtcatcccaatcggggcggttccggcaacacatagctggaaccctaagcagacccactcctccttttccgggtaccttgaattacccactattcaggaccatcagagcctgcgtttgcaccaccgtcaacaagttcgacctgggatcccgttcatcttggatcgactcgcttgttacatctcggacgcgaggtccgcgaggctcaggagatcgctgtacggtttcggtttgaacgtacaccagcatcgtccacctcgactcggacatacggatcacaaactgcagggtcgaagacgctcgtccaaatcgagcgcaggggacactatccacaacctttggctcgtcgacggctaggactgatcgttaaagatcccacactggaccgcgatcaagagtggtcccgagatccgctcggcgggagaaacgtatcgggcaatcgaaaccatccctttgagtagagtctcctagtgtcgccacattgttcgtccggtctcgacgaccaaatacccttctcatctttttgaacgagaattaagagggccgcaagcgaaaggacgatttctcttgcgcaggaatcaggcggaggaaaacgtaacgtatagccgagaggggacccgcgcagacatcggcctacccgtcagacccgcctgcccgacatgcccgcaatcatgtcttcctctccccactctctcccatacacctctacagtggattcaaacgacccgacgttcgatcttcctttccctcaaccgctcctctccctctcctgcacgttctcatcgccagcgttggattccaagctgaacagcgcggataatgtcagcaacatgtgggcggtgttgacaaagtgtaaagatgtcgtcaaggatggcagacgattagaaaacgtgtgctggaggtgagtctgcggttgaacgacgagcttgaccgctcgtcctgcgccgaacggatcgctgaccgatgttcccggtgtggtacatgaaccaggctctggcatcaggcctgcgtcaactctcacgctggcagttccagagcaggttcttctcggtctcaaactccgattgtccggcgcgattatgcgatcgatagcgaggacggctattcgaccatctcttcaggatcgtcctcggtgagcagtctcgatgtcgacaacgagcgggatcgagaagccatcactggggatgaagaggaaggtgactgggaatcagaaatcgggactgaaggggaagatgagactgagcagagccgcataaaagtgtccgcccgggagtcggtggccagggccagccctccattgaaagacttgcggacgggctcggacgaaggaccccaagcgacagacgaagaggatggatttgtcactaccgatggagaggacgacgatgaagtcgagcaagaacaacaggcggcacctgcacctgtcgtgcccgttgcgaccaagaagacccccgcacggccggatatggctaggaggcgatcgagtgggaaggataagaacagaatgaccatgacccaggaagtacctcgcccggcacaaaatcttggaaggatggacaattcgggcaagagcaaggctgggtcgtccaacttgatcagctcaaccccaaaagcgtcctcctacccgactcctttgggcagcctcgttgatgctaagcatcctcattctggaacagaggtcacccgcacgaggtcgcatcttgaagacgtgaccgctaggcaaggcatggaggattctcgagccgagcttggttgtggcaggaaactccgatgggatggaaaggcctggtctcgagagacccctcagatgagagctgaacgggaacgaagcttcggtcaagttttggacctcgtcttcaacaaggcggacggtagcgtggacgtgcagaaaatgtgcagaaacgtcgtcaccgccaggcgtggatcaagcagtacgggtcgaggtgccggctcgccatcaggggacgtgcgagagagcgagacaactggggccttgccggccgtgaatgtagcggactgctccgtttcgcctcgtacgaatgttccaaattgggagcatgctgcaagtgtctctatcggagggatcgaagactcgcatcactcacgcgtcgacgagagtaaagcgtcgagtttgactaccgcgccttcctctcttggtggcctcgaagtccgggtcgtgggaccgaccccggttccaagccgagtgggttccttgggggacacaacggcgcctacaccgccaaagtctccactcggatccgttatgcagtctcccctagcgctgcccaaaatttcggaatccggcagtagcctcggcggttctggtttaggcagcatgacttctcgatcgatcggtctcgcaccgatgtcgaccatcacacctttgccacagcggacacgagccgtgtccaatcggtcggctcgctctcaatctccctccgaaaagagcactctcagtcggagtcctgtctattcgccgcagattgaaaaggacgaccccatggcctccatgaacgaacgctcgtctgcgacttccaatgacggttctgagcggtgtgagcggggggcttccaaggagtctacaggaacatcgggtgaacagcgcttgtcaagatcggcgttgcggagactgagcgagtcgcaagtggagccctctggcgatagccaagcggcatcgtcggctcgcaaaaagggcaagaaatcgatgtttttcattcacagtcctagcgataggcgaaggcacggtagcgtgtctgccgtcagtgatgggagcaccgatgctgggagtacgctcgcggacagcagtgtcggcactacgcgagtgccagcttctcctgggcgacctcggtctgtcgggaagccgggaacctcaccgttggcgtgtcatgtctccaatcctgagcagccttcggatatgctgcctatcacatcgaccgaggttttgacatcgagtccgcaaccgctcgtcggagttgcggaaccaccgaaggacagcaaaatcgccggtaccagcgggctaagacgcaaatccagtggagcctcccgagctccggcgaggcgtacctcgaccgagaccaagcccgccgtaaccaaaatgcatccagctcatgcgcaagtacagcggattcacgcgcccaagcgcgttccttcggcgtccaacatggccgggaagtttgctggtgagaaagccaaggctgcggccgccatcgcggctcgtctagaagcacaacaacagcaggaaaaagaaagacagcatcaggctagaagtaagatcctcgacatgaagcgacagaagagtgaacccgactttctgggcgctcaagcgcgagccgcacaatggagtcaagaggaagaagacgaatcgttcgaaacggttgacgatgcggaagacgacgaagactctgaagacaatgaagcaggatggagtagtgcaagtgatagtccacagaaggcggagaagaaggaaaagcgatcgtccgatgtttccgtagctcccgggaagagcaaggttgtcgcaaacaagacggtgtcaacggttcaatctcaacaggctaaagccgcagaggaagcgcagcggaagcgcgaactcttcgccaagcgagccatctttggaaatagtggtcaaagcagtctttccctctcaaggcctgagcccactaagccggaggtggttacatcacgtccgggtctgcttagcaaccttttcgagactcagcgcgacgtcttgcaaaggggtgagagcatggccgatctggtgagcctgagcgagaaagaccgcgggaagcgctcagactgcttacacatctgccgacctgatgcacaaagacacagacagcaccacagaaacacgatgcctccccggcctccgttgctcccatggtcagcgttatgcatcgcagcaagagcgcagcggcgatcccggccatgactggagtcagcatcggccgagggggtctgatggaccaagtcgccgtcatcgaggctgctgaagccagcaagcaacagcctgatcaaggcagaagcaaggtatgtgcaacacgggattgtgctgtgtttttctctttccttccatcagcttatccactataattctagttccgactacccccgaaacctgtcaacgcggccgatctatcgccttcctcatctccggaagaagattcgaatgtcttgcagcctagctcggttgccttgcggcgactagaagctatctccggtcgcagacaacaatccgagcgaccgaaagccggacaggagagtcagcccgccaacggtaacccagctctccagcggcttacatctggtctagccacgccgacagtctcgtgcgacacggcgggtataagccagcccgtgcctgctgccaacccacaagccccgcagccggatctggctttgccccaaacacctacaaccagacgccgtcaaatgctggctactgagctgcccgaagatctgcgattgagtgagtccaactgcagcaagttcacgctgacattaccagctcatccggcgctcatacctacagacctgatttgggaacgaaaatcgagagcgcccctgtatccgatgaggaaaagctccggactccggtcgacggcgtctgctcaggatcttccagagactgcacgtcaagcacaacaagaagagacgcctggcctgactcggcaacaaacagagccagcgggccacgtcgctgacaacgtccgttctgagccgtctctcgcaaaacgccggacttcgcacaatctgcttggtagcggcagcggtctgagacccctaacctctggagcaccgtcgactcgacctgcgcaatcctcaaacgaaagattgcctgctcatcacgcagctggtccgacacaaccctcaaatctcaccaataaccgtagcaagtcgacggcagacatgagccattggcatcggtcccgaatgactggtcacgacgcggccgattacgaaatgcaattgacagaaggagagcaagaggttcataacgactgggtacgggcacggcgattacgacaacgcgaaggggaactaagctcgtccttccgatcacacggctggtaaatcggatcactaaacattccatgatataccgccttctcaatatgatcgtgtattctgtacaaacatcccttccgcatggactttggaattcaaaacgttgtatttcccgccgatcagaagacattttttgcatttgtatcgctgcagcctggatgatgtcgctatgaatatgcatgtgattactacaaatctcctgttgatccggacggaatttcgtaattgtgctggcctgaattataggtacacatgggtattgaacaaggaggcgaagacgaaacttgatgactggtggctggaatctggacagatcattggtatgtctcctgtttcgaaccggacacggtgcgcagaggaagctggggttcttggggtgccatggggaatccctccgtatgcttcgagaatggggggatactgcttggataagtcaattgggactgatccatcaaaccggagtaggatcgaggtagtcccgccgacatttcatcactagccgggcggatctcgacgtgatgattacccatgctcgcgagggtaggtagagagccgctcgaattggatgacaagccatgatatgattgaggggtaggtggcatgccttgattgtactgatgctgatgacccgaaccaaagtaagggtcgacaggctctacctgaacgtggtagataggcttgtccggtggaggcacagagcggctgacaggatatgcggggaagttgacaggtagtgcctcgtgtggcgagggagcaggcatcaacggtgccggaatcgtgtaaggttcaacgggaggtgaggggtgccgagtaagaatgggaacctgaggaggtgccatatcgccgttgggggggagagcgtagttcgcagactggttcaagaactcgtttcagcggactgggacatcgggacccaatccagacattactactcacgtattttccgatgatcttcttcaaagccgttccgaagatcttccagggaaacaccttgacgtccttttcgatatttcggggttttgggttcgggaaactcatgactagcttgaaaaagtcctcggctccttgcttgttcttcgacacggtgatcggtcggaatccttcgagattccgacggatcctgttcttttcctcgactgagaaccggactccaaccagcgcctccagtaggtagatgccgtcgaccgacgtcacaaagcactcgttcttgtcttctcggtagatgcacgagattacgatactatttggtatatactcggcctgggatatcgctcggaacgcggcgtgaatgacagaaccctcttgtcgacgccagaactgcacaagtctccgtttggcgtgccactcctcttgattcctacagcatgacgtagccatgcatcagcgatgagatctcgccctttcgctacatggctgaatttcactcaccatcccactgccatcaaattcaggtcttgctgaagtaccaaggacgctttcgcgttggagacgacgtatgcgctcaccggcacaggtccgctcgacagctggctcgttcgcatcaggctcggttgagaccccggcggtcctcccggagcaggcgaggcggaacccgacactggaacctcgtgaggcgactgctgaagaggggaaggttggggtgggggaccgccgtagggatttcggcctgggccattcggcgtttgaggttgccaatcgcgcggggtattgacggcgctcgggcttgcgaatccagatggatctagcgatggatgacacagaaccatacccgtcagcatcgatcgacggggaagcaattggacaggttggctgctacgcacaagcaggattaccgcccatctggaatgtcggcgtcgagctgtatcgagagggatattccgggcgatacgcattgccaaaattctccggagactgtccagccatatgcccattctcagagcggccgcgtctcatcaacgtcgcactcggaggtccgaggcccggcgacgatcgtcctggagtaaggtgttcgaccggcgtgcgaagtaagcgtgggcccgatgaagcatagggggatgaagcataaggagacgctgcggtggcaagcgggtcaatatgagcgacaaacgcaacggagcccggccacagtcgagactcacagaaaggtatagcttgctccggtagaacgtggccaccttgtgaatatgtgaatcgtcccatagtcttggtctccaagattctgttgtcgtgaccgagcacctgggcgcacacggtcactgagaacggctcgaattgtcgattgacccccggcggcatcaatccggttgagatggggtcgggagcatcggcgtaaagcgtcaagccgtcgaaggtttcattgccttcaatatcggtcactggtacgatattcgtgactttcgtcggcaccggtagctgggcaaacaggatgcgaagggtctttggcggtggtgggccgatttggtgatccggagttggttggaaggggaacatggcgttgaccacgatctcgacctgagtcccctcctctccatcctttggtgagaatgagatcaactgcaacatgctgcttcttttgactgattcgacgggactgccgaggaaatcgtgcgactggtaaagcggttcaagaggaggagcttgctgctgcttttcgagactccacgccgtatggggagttatgttcggagtgacaggagccgatagggggttggtggatgaggatgagtacccggacgatatatagagagaaggtgccgagctaggagccgagctgggaacttctagagggaaaggagaatagccggcagtgggatgaggctgcgccgtgtaaacggattgttgtgggtgataggggatttgatacatgtctgaaggagagggtacgggggtcagcctcgaagttcagggtgccttgttaccgaatcatagcaaaagtctacgcactgtcagtttattgaaccgatgtttaggccatgagtagtggtgtccgccgagaggatacgagttttcacagaggtaagagaggtaagttgtaagacagaggtcagtccagctgaagagattatgacaagcaatcggtttggaaaaggttgtggaggacgggcggggcgggcaagcggctgaagttctagcaagagtcgggttgtcggtagcaagtcctttcccgtagctgaagacgagagtgcggtcgagtgattgcgaggcgagagacgtgaaagaaaatgactaggtcgtgatggcgatggaggagagcatcgagctctgactcgtccgaagtcgactgtcgacagaagggttatgggtatggtagatatcgagcttggccccggctgccggcgctcgatggtgcggatgaaggcggcggtatcgtatgcgtgcagtatttcgagcgaggagcaaattatcgacgtggtcctctcctgatcggcggtgcgattaccagcctgggaatttgcagccgctcgtatgcagagccttaagaaccggttcgggcagtcgcgagcgggctcgcaatggaggttttttcgccctccttttctcacacagataaaggtggcttgcgaaatggactggctttcgtcgggagcgtagatgtatttcgtgcttcgaattcttgattactgatcgaacgaggatggcgagtcggatgagatggtggtatggcgaatctttcgtggcggtagaaggcttcggccttgcgtatatggtacagtccggccctgcactagtgctcgcgtagacagagcttttgggattgcatatgcggcaccgacggaggacctgtggatttggccttggctgttgtgtgcagtgtgacgcgcgaggttcgtgcatgtgagggcagcccgcgaggtcccgatgaaggggcgtgcgtgatcctaggtgcgtgtgatggttcgggatggctgttgggtgcacgcccgaggtaccgagtagtcgtggatcgattgtggggaagtagacaatgcgagggaagctaccggcctcaaccgggcgcgacattgcagacgcgttcctttttcgtccgtgagatgatgcgatgagtagcttctagcgtgctcttcctgtgcctcaccggatcttccgggtcgtccgtgacaaaccggaaactcgcgggctgagaggcattattgcttcttccggtcgcgtaatggaaccggtcggccaagaaagcccccccccctagtcggaccctctgtacctttttcggcccttccgatcccgagtcctgggcaaccaatgattcgatcctcgatcctcgtgtggaactaccgttggacacccacacgctggcggaccattcgtgatggtttgcacatcacatcggatcgcaccgtgcgaattctcagtggagcggcctcgctttcgaggactgtgcgtgccttttcccctgctcctgaaccttgccgctcggccgacccggatgtgaagggaaagaggggatggagaggaaaccgtagctaggctagactcaccaaagcaacttgtagaccgacacttgcgaccacagaaaacgaatcacctcttgctcatgcaaatgcaacttcgtgcagtggactatatcaaaaggcccgctctaatctgataaattcgcctgcctccgagagaggatgtacggtctcgcgtcagttccggatttgccgagacaccggtgaggagcttgtcgtgattgatgtctcgaggatgattatcgtgcggggtggttgggcgagtttgaaaacggtccgggcgactatttttctttccccgtcctggagactgttccctcttctacgaccgagactttgtatactcttccaaactgctgtgggatcggtagagtgaagcgagtgtgcgattgcaaggacgaatgagcggtctataataacaatgcgccgagtgagatcggaggtgatgacaacgcacaattctcgcggtgagactatttcgtgtctcgcaaaatatcgtgcgtatccccttttaagcgacaccgaacagcacagcatcggcagcctgctcaggtgggttacagatggttgactcaacacaaggactgtacctgaaatcgaggtgaagagaggcttgtcctcgatgtcgatctaaagtggtttcgaggtctaggcgagcgagctttaatgacgatgcgtgcgtacgtgcatcgctcgtatcgtttcaagagcagagacgtgttcgatctagttcaacgagagcctgctcgatcttgttgtgacatatggccatgacccgcagtcatcgtagttccgataataatatcaccacttgtttgcgatccagctcaactacacttacactaggtctcaaggaccaatattttcctgatcgaagaatatgctatgcgtggacgctgttgcgttgtagggtgcaggtctgcaagcgaggtccatccatcacgtatttccccacaggccgtgccctgacgcctcctcgctcgtgataagacgacagattacactgcagattgattgatgagcgtttccaagtggatccttggatccatcacgcctgatcacgaccagaggcagaagggagagcgaagccggacagcattgataggatacatcacttcaaacagccccttcatcaaaagctacggtgactcgccttccttctgcctcgactgcctggacgtcgaagccttctatcaattgatcaatgggctacgcctttgcccatgtcgtgtgcgtttcaaacaacgtcaaaggagggtcgggcgggcttgggcaagttgcctccgtcctgctgccttcgccccttgtcacccgaaggagcggatagaaaggaagatcgaggatacgagtgaacctaatcgatccgaaaccggcttcggagaaggaaggctgcgctagaatcatcgagtcgaaacatccacaaggcatagcaaagggagatctgataggaggattgaacgatttgagagctaggaaattgacctgcatggcctgtgccataccctaagtcatcatccgtgcgcgtatcagcctttgatcaattacattttggtcagtctagcttgtaccttgactcgatgtctgccacacatcatccatcgattacgacagacacgttatttcgcacaaaatagctatcccttaacgtggaccttcgcgtattacttagccagccggctcgtctcgcttgaggcgaccaaattgccatccatcaatcacttcgaatagtgatcgagaggcagaccttccactcatccggcacgatcaagtcacacgcaggatctcgtcgacctagggccgcatgttgaccctatggggttactttgttcaggtcaagctcgatccgatcgccaacgtctttgtcatttaaagtcaagagctgttggatgcataggataaggtcatctgcgatcatagctctgaatctcaaactgatatctgtcggacgaaggggcaggctcggtttaccgcctcgatattccgtagatgaagacgcggaacggggcacgattcgatggtcaagcaacgtcttgctgcgcgtttccgttggtctgcttgacagtccaggtcttccatggctcctggccgtttgcaaagctcgccattatgtgcaccatgattataaaagcttcgttcatgtatgacgatttgacaaagtgtatttgactatcaaaggtgtgacggagattcccgccctaaagagaaatcgaggataaatgtgacgagacgagacgcagaatggatttcaccaggtcaaggaaccgcatgatcgcgtttaagcagcaccagggttcttgagggccaaaagacgcatctcacgctcacgctgtaggtaagaagcaatcagatgagcgtcagccatcgtgtgtcgcatcagatccgacccagatgtggactcacgtcatcggcagccttctgagctcgcaagtcgttcaactcggagctcttctgggcgaggatctcggtctgagcctgagcgtgctgtcgggtcgcctcgtactgctcctccctgctcctgaggtcggcttcgatcctgtcgtaagcctccttttgcttgaggaacttcttgtacgccttgtcgtggacctggagagccttggtttgcatcttttgcgccttgagctcctcctataaagggggggaccgtgataaccgtggtcagtgaacggaacctttgaaatgggatcttactgcggaaactcacctgagcggcagccttttgcatcttttgcaacgactccaactctttcatggaagccttgacggcagcggcctcgatatgaccctccttgacgatcagcttggacatcctcttggcgtccttcttctcggcggtgctgatcctcctcgaaacggccgcaccgggctttccagcggcgatcaagtttcgagtggccaagtcgttcctgttgtggatatcctcacgaccataagtctcggcgacaccacctccagagagggcggaaccgttggcgaaagcacctcctcgtcggacggtggaaccacgagatacaccggttcggtaggtgttggctcggtccaaaccgccttcagcggccgaggcgcccaaggtcctgctggggctaggagcggtgggcttgaacgcggtcacgggaggtccgggcgaagggccgacggccgatccaccttgttgctggttgggatcgatggccaacctctgcatgcccaactcgggtccaggggacatggcccgctcgttggtgaacgactggtcggggtatcgctgctgctgcaactgttgctgttgctgctgttgctgagggtactgaccgtgctgctcctggtggtaaccttgtccgacggcagagctgatcaaaccaccggcagtggcaccggcgataggagcgtaactctggggaggaatgacgtgctgctggggctggatctgctgctgctgctggtaagcgggctgaccgtggacgaggccgtcatcacggtaagcctgaccctcgtgcatcaactgcctgatctcgccggcgggctgctgcttttcgtagacggcgccgttcccgttgacccgatcggtctcgatcgaccttcggttgtttcgctcagtctcgaccgactttcggttgcctcgctcggtctcgacagactttcgggtgtcgcgctcggtttcgaccgactttcggggcagagtctcggcacgctcagtgtgacgatcgacctggtcgtgctcgcgctcgtgatcaaagtcggggaggtgctcctgcttgggctgataagtgctatcgtcgcggtgcaaaccacctccggcggggagcatgacgacaccaccgacgtgttccctgtcaccgaggttggcgggcgaggcggtactgtagtcgacgaccttgggagtcccgtcctctcgacgttcgaggacggcgggggcgtgatcgatcacgctctcggtgacggtaggggggaactcgctgttcctgatcgaaccggcatcggtcccgggtcccttgatgtaagacctcgaaggctgctcgttgaaagcaggacgttccggatagtcctggtcgttggtgtacacactggctcgggagctctgagtgacgggaacgccgggctcgattccgttgggagcggtgacagggtcccggccgtcagcgacgatggcagaggcgggtacgacgggcgaagtggcgtacgagccggtctccctgtcgccgttgaccgactcggtacggggagcaggggtgacagcgcggtcgttggtctcgtggacagaggcaggtgcggcgtcgaggacggacgcaggggccggggtaatggggcgatcctggtcgacgacggcagcatcgggagtctcacggaccgacctggccgaggactcgttagtcctggccgcggcgggaacgatggtatcgccggtcacgatgccagtgccggaaccgacgacgggctgttcagtcctgttggtagcggtagtagcaggtgtcgcggtcgtcttggccgtgttgctcctgttcatgctggtccgcctgttgttatcaggcttgttgatattgctggtaatagcggaaaagagacccatgttgtcggatttatctgaagtttggtccttggaaatgacgccttccgagttgtcggaagaagcagctacgacggcgggaagttgttcgggttgggcaaattcgctttcctgtacgttctcgtacaatcgatcttcgttgacagctgtcacgggcgaaccgatcgaggtggcgcgagcgtagtcgaaagtgttgggcgaggtgacgagttgtcggtagccaggcagagagtctagcgagattggtggggggagtttgacttggtctgaaagaggagattggtttgaagactgaatttcgactgtttcgtctgctggcgagacactaggggtgtcttcgcgcggtgcaagaggagtgagctgtgaagagctgtggtcgctagggagatctcgatcgatctggtccgaacgagacgataagggctggtctcgaagcgggtccttctgttccaaagctggggttcctgattggactcccgaggtgacttggatagggcgggtctgggtgttgggtgactcttcagtggtgtccgagccgaaaactgctcgtatcacgggtgctgagaggactgcgagggctccgagttctacgactgcgttctgtaatgcactcagtttgaatgagtcttgattcggtccgatcgtttgctctgtcctagtagaggatagagggcgtgtcgagcaggtgagggtagtttgcgggaaatcgttttatggtcgaatgaggatagtcgcgatcgaatagcggatcgaagttcgattgggaaattgacgaggggatgacgttgagatagagtgtgattaaacttgtgtcagttacttcgagtttgcgatgatatgtgcgatgacgagagaaagagagcgagaactcacggatgatatagactggttcgacgacgatggtgacgacgatgatgttatgtgatctgcaaagagtctacgtcctctcttttcgcagtgtgggtcaggtcagcagaggagggaaagagatgacgaatgtctgcaagtgtgccgtgacgacgtctggagagatcttataggtcagggcccacggccaaggtggtggtgatggtggtggtggtccattcactcacttgccctctttcgctctctcgggaggatttccctctttaggcgagcgagagcgggcgaacgggagcaggggagggagggcgggaagttgatcgatgatgcgatgagatgattagccacagagggggaggggcggcaggaggagaaggccaaggcaggatcagtcttcttccagccacctgccacttttggcgttcaaagtaccagagtggcctagagtggatggatgggtggtagcgagatcagagacaaaggttgtcctctccggccctccctcgcccatcccgtttagcaccatgacgtcattttcctccaaccccctcttccagttgaatcagcccggcccgcttcgcgagaacgggtcgatcgggaagaaccttccgcgcgctaagatccccgtcttgtcctgcctgccccttttggcaagttcggtctttgccctcagattcgccctctcactgccgtactagaggtcgagaagcggtttcgggtgtttcatcggttcatcgttacgttgcgtcgtttgaatatgctgaggcgaggtctatctgacgcctcagaagtgttccggcgatccctacaggttcttactgatctcgaccccgcactttgacggaggctttataatcgccttatcaatgggctcacggactccagttccacatgtaacaagctgccatgaatttttgtgatcagaaacaaacctacgatagggcgatccgcagtgacaaaacaggcgaacacagaacatcgaacacagcgaggtcagcgggaatcccgttgattctcactcctgccgagctgactataggtcgtggtagcccagatgggctcttcctaaaactgacgtacgctttatgcgaacaatacaggggccaggagtcttgttgggagcgtcagtaccctgttctattccctggtgaaccaagttcatcgcctggaacggatattcggctagaacaaccaccattggcgagccggagtacgtcaactccaccgtcctcgctgcacaggtctaccgccgaagattccggctgctctcaggacgacatcttacctgacaagttgcacgtccaaaaagatcgaggtcgagttgtttcgcggcgaacagaccaaaaagaagtgctctagcgtcatggcctcgtctgcatacaaacacatggggacgaacttggctcgaacttggctcagaggccaaaacccccaccccaaccccatcccatctcaccaatgatttccgttgatatcattgtgagtctacctcttctctttcgatcattcgtttttccaataccccttcccttacctttgtgacgaccatacatcacaagaaggacacgcttcctcactcgaagaaccagggacacccgttgttcaccagcaagcacgccaatccttcccctgcgcctacttaaacaatgacagcttccctcacgcatggacccgtccgattcgttcgatctgctacttaagtcattcagacagaagcgccgatcccgaacgccctgtcccgttcattttgcactctacaaggcacctgtggccgtgcttccaaaatgcctgccgcgatggcattaaatcggtagggtccaggtgcagatgggttcgtcaatacgatgggttcctcaacgtcgtcatcattataatcggtgctcaacctcgtacaatctcgtccattcctcaatctaggcctacatctgccgtgggtctatggggtttcggccgcggtataggcggcctgatcggtacgcccggtctcgaaggtggccggatgggcggaggacgaccttgtccgggcatccctcccatcgaaggcagagatgtggctaatgtcgtcatgggcgaaggccttactggtcggtggtgccgtgtgatcgtgggctcaatatctccagtgaccgaatcggcatcttccgttacgatgcctgattgatcgtcagccaacaccggggaagtttcggtcttgctggtatgcccccgcggtttgtagaccaagacgatgactagcccaacgatgaccagcagcaagaagcaaatgcatttcctccttcccgtccgtctctgatagttttcggccactttcagctcctgcccggcctcttgcacgtaagtattcgtttgctcgacattgtactcgacacagtccaaaacggtaccctgctcgacgaccatgtttgagagatcttgaaacaggtcggcgagttctgatatcgatttcgctatttgggtgagctcccggtcgcgtttcgcgatctgggagttcatgtccgttcggtgggcctgggcctgagtctgggtgagctgggaattcgactgagagtgagagagagacaggcagacggtgagtatcgatcgtcgttcgtcatgggcgcgtacagttgcacagcgactcacagcctcgatatccgcttgtagctcgtcatacagctctgggcctttcagtgtgatcgctccgctcgccgtcatgagacctttgttcttgttcgcgtgtccttgcaaagctagcgacaagtatcgaggaggagagagtaagcactcaatcccctgatactgcgaaatgcacctcagctgccagacttactctccatatagacccgttgttttcgcctgaaaacgctgcttaaatcctggacttttgcagccagacctcgctgtacattccgggcggccttgatctcatcgggcgcactcgagctcgggcgtatatttgtcaacagggaatgtatctttcgaaagtcctacggggtgacgtcgggtcagatttgggcgcttcatgtaacagagggggaagaaatggactcgctcttgtgatatcgacagtgttggactcgatctccctttcttccgctgtgcgatccgtgaaccctggcaatacatgcttcgcatgcaacttctccaagacagaaactacgagacaggcttagtatcagtaggccgagacgcagcgatattatgtagggagactactcactcttttgcttcacccgagccatgatctcttcgacgtcatccattatgtcgaccctgaagaaccatgcaccgttctgagcaccgattgcaaatgttgccgaacgcatgcctgctggctcaccattttggtggcagcccggcgccggggctatcattataagtttccattcctatcccatcttcttccttgcccataagtccggcccgctcttccccgtcgactccaagcagattactggttgcgtgctcatcaccatagccagttctccgccgtttgaactttctcgaacgtcctgacgacccagaagagtctcgcacagacaggtagaagagcgtccttgacctggtcacaagcggtccggaatcatttggtgccagggtcgataccgcaccccgcggtgtatattgcgagaacgaggtgtcatacgggttccgagcggccgatgtaggtgtactagttccagcattagacggcgagaagaatgggttggaggagggtctattggccgagttttcggtcgtggtccgtgagcgttgtaatgtcggcgtggaaggggtcgttgccgagtgatagggcaagaagttcatgctgagcggccgattggccaagccgacagaaatcttgcaagatacgatctatgcgatactacgactgacaggttccagtccatgagatggtacgtcgttgatagctaccagagatttcgaagagtgaccgaccatatatccgccaaggactagctacctggttgctaattgcccgccgcgtcatccgccaaaaggtcaacaaaagtaaatcacgagcacttcatctgctatctgctatctaaggtgggtcaatctactaaagcatgtcaatctcgtactcttgcgatcagtgcaggaacgtaacgatgccaaatcccagcgacctcgatcagattcactaagttaaaggggtaagtgattgaatatcgtcgtcacattcacaatcgtcgcggacggttcgggcgtaaacgacgggcgaccggtctcgcaaacatggacaccgggaataagcaagaacctagaaagatcatggaaacctctcttcctgtccacagatgagagcaccgaagcgagcccgtcgcctttctccaggtcatacggcctagacctagcacttgggcaaggggttggtaaacttgcaagctttgctaggtcccgacgcgatcttggggggttcctgaaccgtaccgaccagccagtcatgattgagccaacaagaagttatgacccggaaaacacctccagactcacctcgccgttggtgttaccctggtactcgttacagatctctttgacgctagtagcgcaggtgttggtgatggtggcagtatcaccaaagttgctgtaaaagaacccaatcgcctcgaacaggtcagaaaacccggagcttgagaacgaacgaatgggggaacgacaaaactcacgagttgataccggtcaagacctttccgttgaaggccttgacgtccttgacgatgacgttacgcttaggggtggaagtaccgatcgacttggccttgcagtttccgcaagatcggtaaagcttgccaaagtcctgagcaaggccaagaacgcgaagtggcgatcagcgaggtgtaaatgagtctgatgcgggagaaacacgaggactcacgctggcgtaaaatccatcgatagtgacggttccgactccgttgtgttggatgatcttaaccccagacacgtagccagagtcaatttctcgctcggaaggccgatacgcctcacattgcccaccttgtcatctgcaccctgagcacctcctccgatgatggtggcatctccgttacccttgagggacaaggcgtcctcacagacgttgggccaccagacgttctggatggtacaggcgccttcgcagtgaacaccctcgatctggtcggcaccgatgatggcgttcttcaagacggcgccgttttcgaggataaagacggcatcggcatcgccaccctgcaacgaaaggtaagaaaatctcgtcagtcgggtcaacgaggacgagtacgaaagtagccgggtaacccacctcgtcctggccggtacacttgacacctcggccataagtcttgccgagtccatcgaaaggctgaccggccttgatgatcttgggttccttgtaagtgacggagcccttgctagcagggatggggaaggtggctcgcttggcgatgttgacagacgagtcgggagtcgaggcggcagaggtcatggtcatcaagaccgaggcgagagcgacgagagagagctgcattgttgcgtttcgaggtggtgtttgaagttgggcttgaagtgagagttgggctctgtcaaagaggatgcgggtgtgtggtttggttcgagtgataggaacgagaacaaggaattgtctactgcgatcgagccttatatacctttcacagcggtcgctgtcactcaaaatcgagggatggaagctctgtcatttcgggttaatccgcgaggccagcttgaacctcaagccagccagctcggtccgcaagcgatgtagtcatgctgtcagcgttaacagggatatcccaattcggttgatgcctttggcgattgaacgaccaaacgacgaaactcgatagagggtaccgcgtggggcagcgtcgcaaaacaaggtggacgacctcgtttgaacccgtcccgtactccgtttcagggggcttcgtagcgcacaagtcgtcgtcctgtctcacaccgtccggtatgtcgaaaaaagattcggaacctatcgactggaataaccgaacggagcatacccggcccggtcgtcccgcactagttgaaactcgatcgatcgtgcttccactcgacggccgtcacacgtttcaccgcgggtagcgatacccggacggcgcccgccaacgctcaaggtacaccaattgacgcgcaatagcggtttgacttggcaaacggacgggctcgggctgctctgtttagtcgcacatacgagtccttagctctgtatgcggactacggcacgttctcggggcgaatagggctcgtacgtgaaaagatagagtttcggcgctatctcgatccatcgctaccgccgggggaaacggctggcttgacggtgcctcgttctggccctaggcgaaactacgaaaaggtaccacgtcaagcaccttttaccctctggcgtctcgaaaatccgagcgcccagcaagcggatcatcgagtcgagggagaagcggacgaccgtgatcttgggggtgcatgcggggctcaccgaaagcaggttcttttcggctttccgtcggggtcgatacgtccgtgcgatggcgactttgattcatgtggcccgatttcgagtcaggtcgaccgctcccggtgaggtgattcatcagggcgatctagcaaggcaggtccgaacctgaccctggcctaaaaaccctttgggcttttgtcgtcgtaccgactcggactgtacagggcacctgacctatgatcaactgtctgcttggtcccatcagtgacatcttggcggtatgccccggtctgaccctgtctcccgacgagcgatcaatgacatggctacaaagcgtatgacttgacccatttcctcatcacacatcgtgccaatcagggatacgtgcaccgcgaccctctgaacacgtcaggaaaagcagactatcgataagatgcaggtccgtcgagacgaccggggagggagggagaattctaattatacaatttgcaccaacaaaggggacgcgacgtagaccaaacgggaatgccggggaaaacgcaacacacgggtgggcgaggagaacagccctggtatctcgccgttggtctcgtcgagggagagagtcttcgagggaaatgttcatgattcgcccggtagagtgaaaaattctagatcgatgaaactccccctcgcgcctagctacagatcccgcaccaagccggtcgagaggcagtccatccgccagcctcgttcaaagtcgttaagagggttatgaggaagggggtaatgtgaagggcgagcgaaagggagaaggagggaagggtcgcggtcgaggggggtgtccttttcttcgtatccgtgagattcatctttttgaagcgtcgtatacaaccgtcatggaacgggatgggtcgagatggcgaatttgtggcaacaaaaggcgaccgagacgtctataggaactgttgggcgacgggtgattgacgttcagcctcggtccgtcaagcgccactcggaacgcatcgacatatgcagactcacgtagtcagggggtcgtcgggagacgaggggctctccggccctaggagccgggtcaaattgcaagctgtgagagaggcacacgttgtacctttttagcatcacggaacagtgcacacgtcgcgagtcgctgaggtcccggtgagactcacaaggtgtacttcaagttgtcgtccacctcgaggatggcagcctggttaccacatcggtaacaatagttgggagccgaaaagatggtgacgacgttcttgtcttgcgaccagctgataaaaggtaaaaccgtcgtatgagcaaccgatcgaggaggcaagggtcgttcaccatgtgacgtctgggtaaactcacgagtaaccttccatgacgagctgatgcgcacgagcgaccagagtgagcccgttgttgtgatctatttacaagtcgagtcccccgggtcgctttggttagcaactcgcttacccccacacaactggggtgaccagccaggcccgattacgaggactcactgaacgcctcgctgatatcctgtccgaacgtgtacccagcaccacgcgggctgattccccatccacacctatcgtcagggtccgaccacaagaggtcacacatgggtccctcgtgcgggacttcttggatcctgtcgatagcgcggatatggtcgagcgtgtcgatcgagggggagagacctccgtgcaaacaaaagatctgcgacgagaccaggcaacaaggtaagtttcctgtccgtgtacccgcaaactgttcgcagggaaccacggcgacggtgacgaccatcgacgacactgacctgattgtcgatcaacgcggtcaagggcaggtaatcgaacaggtcggtgaaaaacttccaaacgttggcgtttccatactttcgcagacattcgtcgtagaacccgtagacctgggtgatctgcctcgactcgtggttcccacggaggatggtcactcgatcccggtaacgcagtttgagggcgacgagcaaggtgaccgtctcgaccgagtagtaaccccggtcgacatagtcacccatgaagaggtaattggtatcgggcgaatttccaccgatacggaagagctcggaaaggtcgtgctgtgtggaagcacagtcggttcgccgggtgggaggggagtcgtacatcagctgccgttgctcctcctcgctatcctccgaaccctgcggaaaggggactcacgaattgtccgtgaatgtctccacagacggtgacggggcatttgacgggctggacgtttgattcttccatgagcacttctctagcctgtccggtgtcgcatgattcgtcgaggtcggggtcggggttggggtcgacatcaatgtcaaagtcgtggaaagcaagagcagcggagagtgaggaacagataaagattcgaacgatcagtgactgcgctggcgatgacgataaaaaccgagcccagacgagaagagggtagaacgtcacgattccccggggctagcgtcatcctccctcatcatctccaaccgacgtctgacctgatgctatcatcccatctcatcccgtctcgtctcgtctcgcatctcctctttaattgaacgtcgaaaccacggagggtcccggtgatgtgataccgcagaagcaacatcaccacgaaataaggggggtcctttcggtgtttacatggacacggaaagggaactcaagacctagatcgtctagcgtcccagtccgatccctccgtctgaacgtatcagcatcgggcgtgtcgtcccttctaccgtcgaggatcccaattcccggattttatggtcgatgatatcgtatgtgtccagttggcgggaaaggaaggctcattgacgcccggattcgacacgacacggcatgacatggcaccattccatcctcatctcgtctcgtctgatctcggtggtactgaccttgtcacacagtttcttcacttctccctcgctcaggggtttacagttcatcaactgggcgatccagacgtctggatcttccgacgagttggacatgatgggcgggcggcgccctccctttcacgttcacccgggtcctttgatcgttcgttgaccttctctccctgatccctgaacgaacgaaccaacgtctgacccgacctcccgcgttgatcgatcacaactgcaccaccactactctagctagttcctcaagtcatcgtcacaacatacactcggtcttcccactccgttctcgacatcccctcatcgtacatagcctcgccagggaagtgagaagagactcgtcgttctgaatcggattccactttcgtaaccctctctctccccttccctctcctctctttacgtccggatccccacgcccggacgttgcatcgcaccctttgaccggtccttctccctcggtcctccctttctctccggcaagcatccacaccatctccacttcggtcgtcgatcatattcaacgacgactacgctttgttctccacgaaatcggcatagaccatactataacccggacttcattaagcgacctcggcccgacatcaggttgattcgacatcaccaatccttgcggctcgatcaatccgagccatgtcgacctctagacctgacaacctggctccgagaaccaacaccaaaaagaagaagaagtcgggtctctccggcttcttggctgctatctgtgggacagacaagggccacgagacggagagcgcgaggcctgtaggacccaaacccgtcgagactgccccgacagcaacatcagaggcgaccaagcaacaggacaaggccaccaacccgaccgtagccgtgtcgcagagctctacgcctgtcgagccacaggctagcgggtcaaaatccaacggcagaatcgactttgttcagtcagaaaccgccgggacgacccttttggcaaccaacgccgtagtcccgcccgtggaacctcagacgatgttggcggtaccgacccaatcaggtagcgacgcggacgcgatgaggggatcttccaggatggacgtcgactcatcatcaaacgatgcggttcgagcgtccgccaccgctgtcaccttgggcacggcttacccaacggcctcttcaccccaacccattcatccggtatcggccgtgaacgagatggctcaggccggcggtgtgggtcgagattctcctgcacaagaactcggcatgacggatgtggagatgggaggcgagcatgacaggtcggatgaaggcgtgatcgtaccggcaggggcagccacagatggtgtcaaggtaccccttgaagaggtaagccctccaaatgagattgctcttcgataggtacctaataaactcagctgactaacatcacttgcccgcagacggaagggttgctttcggcagccgtacaacccccaggctccggatctcatctcagtctgcctacaacgtcacatcagcatggatcctctatgcgcgatcacagtcaggacgtgcaagacggtgcaggaactgcgagcgtgggagacacatcgatcggcacgaacgctatacctgaatcggaaacgcttgacgcgtcgtcaaacactcaaggagaagatgtctcgcagcaagagcaggacatcatgctgtacgatgaggagccagatgaggatagattgatcgctcagggagggatcggtattcccatcggaccggtacgtatgaccctgtcctctgctttcacttgacatcgggaaactcaccccgaaccaaatttgatcaggacggtcttcccgcaccactgctacctcccatcgcgcctgaacacgccggcagaaagtgcttggtcttggatctggacgagacattgcttcatagtagcttcaaggtgggtcaagactcgatcaggaggactacatccggagatggggctaatgtggcgtctttcagggaatctcttcggccgactacattgtgccagtcgaaatcgaatcgcaaatccataatgtttatgttgttaagcgtcccggcgtagacaactttctgctcaagatgggagagatctatgaagttgtggtattcaccgccagtttgagcaaggttcgacctctcgctactcttatgcattcgcaactgtcagctgactacaattttctccaacccccagtatgcagacccggtactagatattctggacatacacaaggttgtcaaacacagattgtttcgtgagagctgttacaaccacaagggtaactacgtcaaggtgagtgccaataggtgatctcgcggagcggaaagtcatcgcgtgcgctgcgactagtcactcaacgcaatctttctcaggatctgtcgcaactcggacgagaaatgtccaagtccatcattatcgacaactcgcccgcctcatacattttccatccgcacaacgctgtcccggtgtctacctggttcaacgacccccacgatacggaactcaccgacctttgcccattcctcaccgacctgggcaccgtggacgatattcgcggcgtactggacggctcgctgtgatccgccttaggacctcaacaacgcattatccggttcgacgtgactacatccccgttcttacctagaaatattcaaggagtattattccccctcacgctcaaattttcgctcggcatacggtggccagataggcgcccacttcaaaactttcaacgacccctgacttgattttaggaatgcctattacgtgtatacccatttcgttcccgctgcatgtattcccatggtgtgttgtttttaatccgggattatggccttcatgtttcatgcatatatatatatatactttcatggttgcaagatctgagcgggagcagcatcgctcacggtctgtgttctggcacctaagagcggggagatggcttggtcagcaagtttcggtcgctcgaaaatgatgggcgatgtcgtaccaagttgcttaagggtttatcagacagcgcgtccaaaacgttcctcagaactacgagcgccattttcttcctagagtcgtttgttctgggagacatacagttagaggcgcgccccgtagctcaatctccggctcgactcactcggttcccatgtggggcaagactgacacgttgttgaattttaagagctctgggttgatgttgggctcatctgggaagacgtccaatcctgcgccatacaacttgcccgattgcaaagcttcgatcagagcctcttcgtccacaacaccgcctctagagtacaagaggtaggattggtcagccggttgcgccacttcgaatagcctgtagggaaatgtaccgagcggtattgaccagcacggctccaggtttcatatcgtcgaattgagccctggcaaaggatttttcggtctgcttgctcaactgcgaacgagacacagcgggcatcaagcaattgcgaccgacaatggcctgtccgctaaatttcttaccggcatatgtagactgaccacatcggcctcgttcaacaactcagccaaggtggctttgtattcgcagggaaaatctggcttgggagatatttcccgcctgttgtgataaatgaccttcatatcccaaccaagcatcctcttggccaccacactgccgataccgcccattcctgatggcacgatgtcagtttggcccggttccgtcagataggacgcttcaactcgccgacgattcccagcactttctgctcggggtcacgtgccagtggtaaatcattcttccattgccctcatgatgttgtatctgagcacgcgttcgtgataccgaccgatcgaacgataactcacctcgtcgagcggacatctcagcccttgaaaactgtcgcatcgctcccaatatgaggtagacagccgtggtcgccgtggcatcgtcgaccgcgccgggtgtatgagacacggcgatcccgtatcgcttggcctccttcacatcaacatcatcgtatcccgctccaactaccgagaagaccgagacaccatggttagtgtacagtaaggtagctcgctagcgcgacatacaatgacagatagttttgcaagtttgaggtaacgcctggtagaaagctgagtccaggcttgcaatcggttgagagggatcgtgaaagtggcagatgaccttgagcccgcgatactctgtgtctcgccggtccgcaatctcggtaacactacgagcgctgagatcctgttcgcgcgatgaaggctgagggatcgttacatttaggaggcatgaccgagacaacgtacgatgatgtctgcaatcgccccgacctgatcatagaactcctcacgagcgtaggacagctttcctgtcgttgacgtcaagttttcagtggccaaggtggatggccgacttcagtcgtaaccaaatcggtaaacatacccatcaaaaggacctttggtcttgtgtcgttgctcattttgtccgccttaggatcgtccaagatgatcgatgaatggggcaaatacggacaggacgtattgaacgatcaagttggttcagatatgcatcaagtccgtgtgacagcaatcaaatagccaggggcatcacgtcaagtggtcagggaaatcatgcccagtaataagtgacagccgctccgcttccggctcatcgctccggcgtttcaatgtggcaccggcaatcggcgttgcctaattaatacgactcagggcctacaagctctgagtgaccgaccccaacccgggaaaccctatggcataagtataccatactaccaaacatataaagcatgagggaacggttacatattgagtaccgagaaatgatgtgattgcagtttgacctagcgaggcaaaggcatcggaaaccatgctataagatgggagtgcattacttcaagaatttgatgatcaagctgtgtcatagaccagggaggtgttacccatgttgtctctctgtacataaaggaggttgtcaaacactatggtgctggaaattcttatggaagagttctggagactgtatcaatttaggtcaactattacagattgaatccgacagccacgcagaagtcaatgaaacaattcagtgcacagcattcttgcgggcaaagttgatgtaaatgtctaaggggagacttgaatattcttcaagtttgcattttgtacatgcacattgtacttggtacattgcacttgggaccgtgtacttgatactttgtgattggaactttgtgctctctgggggatcatccttggagtccatcatgtgacaccacccgggaacattccaaggtgacgtccattgttatatattgtggtaagtatccgcggatacgacctattgccctgggcggtaacacctccaactgttgttgtactctcatccacccagacactcccaatctcatcaataggaggcaaggcaaagaggaccagggtactctactgcactactttcctcattagagtcaacagagtcagcttcacacccagctgccaccaaccacctttgccaacctgtttgaggctcagcttgttgcaaataggcatgccatgattggctcatggatgcaggaagcaatctcaaccacaaagcctcattctgtagaatgtacattgtacttcgtacaatctacaggattcactgtgaaatgcacaggtttcaaggggttgtggagccatgaaggctaccatcagaatggtatatataggaggccaatttggcctcattcctttttccctctcatgtactattctacttttatacaagcaacattgatcatccttttgcgacaaggcatcatcagcaccaaccatagtgcctagacctagcaagtaaccaatctttgtggatctagttgttacttcacaacaaatacctcacggcggaccactgcttgggacactcccaggacaagtcacgtgatagactccgagggattgcgaggtgacgtccaacgtgctatatcgtggtaagtatccgcagatacacctattgagctgaacaatgatcgaggtggggtggaccatggaagcgggaggggcaagtgcagcccaaatcaggcaaacctcatagtctgttgacagtaattgtagcattatttgaggacagctgaaaagccacctgcctgattcttacagttgtattgtttcccttacctcatcagaaactttgttggtcaactcaatgacctttgctacgctttgctgctgccctcgctgctgctgtcctcctggcttttgtaccggatcaagctcagttcggactggggtgagaataccagggtggaatgtaacactggaggaataagtgggagatgggcaaaggcagggttcatgtcacgtgacttgacgagcgtgcgagcgcgagacgcaccctacatccagaagaatctcagaaccacttacaaactctcctagaggcctagtttcattgttttcctagatgatctgtatgggaaacagtaggtatattacctttatctgttttgtagtagttctgatgtacttcaataatatctatgggaaacaatagtttggagtatgtgagcaacaacggatgcctcaggcatcttgactgtagtatggctaacaatcttcttggcaatttgcagcaatgtatcacataatgggcagtgtcactatgtctgccgcaaacatttgagcctctacaaacttcaccatgtttctagatgctccacacatagcagactctggcccaagcaacagtgacactgatgatcagggtgttagggtagaaggttctactggagaagtgagcgggagaggagcaaaggcggggatcatcgtatgtaagtaataacagatgcctaaggcatccgtaacaacatagtacaatagggtgtcaacagacagactttcacttggggatcgatccccccagacaccatcccaagacaccacccccagcacatcatgtgatgtgcccacgcaggcgacccactgtctacggcctgagcggtaacacagggtgtcatgttttctttttgacttgtattccacaagcaaagctatgtacttgcgactaggcttgttgcgaatctgcgactgagacgcataagtgcgactccagttgcaaatgagtcactgatgtgcaactccagtcgcataagcgtgactccactcagagatgcgtgactccagtcacaacatgtgattctagtcacatgttgaccctttgtgcttgagattgcaccctgagcatcacctatgatgtcatagcatgccaatcttcaacaaagattgtctccaagactcggttggctagcgactttgccatgcagccatgtctccccaatgcgaatttggaatggtatgccgttccttcaatactggctacccatggtatgtacaactcatatagcttcatgctgaatattcatggtgcctgtagtttgtgcagtgccgagctcccaaatcagtattgtactgcgacaaagggggcctgtgtgctatctcggacagttgttggtagtgaatgtagacagcacacatgcaccagcatctccttcaagattgatgcatttggaagcaagttcatacaaaagcttattagcctcctgcatgtcactcattccatagccttgaacaaaatccctaaaagcgatcttggccaggccagatgtacgttacgattatcctgccagcagcacagggttttctccagcacttgtaacagcagtatgactgtgtgtataaattggtgtgtttacgcatgaagtacctaagaagaggccaggtatattgcagagtagtttactgcctgctctgattacatctccagaagaagtcgccatgattggggttccctgtttggttgcataaggcctctctgagacacacacagcagatggctataacaattgctaagctggacatgtgagctacccgcctagaagatcctgttgggatagcccactcagtagctgtcatgcagactgaggaagaccacttatttgcagtaccttgtccacgtgctggagcagataggtctggttgtggcttgtgatacggagtagctctattcggaaggatccactatttccgagtcatcttcgacttaggatatctggtaacaatggacagtctttttataggaagaactgtactttgaagtaatctgagcgcctcagagccttgacaagcgatgctaattgacattgcagcgaacacaggatataggtgctgtcaaatctggtataggcgctcctccacgttcagaaggctattttttgtccttgtattttggtggtctacttgcaattagataattgccctgaaattggatgggacatagagctgggacccgttactagcaaatcactacagtgcttctcagtcatagagaaacaaatattgagtgacctgtcactattagcaaatcacaagcaacaaccggtgtcatcattgggtaggtctgtaaagtcaaaacaagccaactgatgtaattggcgtgagatctgagccgtgtagagaactaagctcttgcaatgtcatcggtatttgcaaaaggtcgtagatcttgcaactcccaagtcccaaccttgacttggcaaatgcatggactggtggtagttgggcaatttgcgtactagacaggatggatggaaccaactttttatctgaagatgctacccccacaagcttgatatcgcagcaaaaatctcaccacaacacattggtgggatgttcctgggagtaggctctgtgcaatccttttcttcggagcactctggctggactttggtgtgagcagaaccacttgcatggcagacagatcagcactatcgacttctccaagatgacaggacaaggactagctcacattgtggtgcaagtcttcacaacgattctgaatgccttgcaggcagatcaagtcagttaacccattgtatatccgtaagtctgactctgacagttttcatgatttctgttaccgctctggccgtgtgagcagatcagcaccggggatacatcacatggcgctccagaggcaatgtcctgggagatgccccaaatgttactctgtttgttgacgttctactgtactacgatgttacagatgccctagtgatccattattgctgatatacaatgacccgtagcttagcccctctcccacttacttctctggggaaccttcccatggaaccttccaccaccctaacagatgatccaatatggctgttcaagggaatcatctgcagataatgcctagtgacatgagcggtagcattattgttgcattgaccttactattggggaacacactatattgcttagcctcctgaaccgtctgaaaatgattctctcggaccgctagactgaccagactgccatgctggaatgctaaagaggaatgtcactagatagaagccaatggactagctctcagggaggtctgtccaccagacagatgtaaaactagagactatcattttatatgtgaagataaatttgttagaatagtgctgcatcgatgaaacatttttaggtagaaagttcaaggtgtaactcccgcatgaagtgcacaaaataagtagccagggccactctcactaaagttgactaattttaggcactatgatgtcataagactaagcttccccctttggcaaagaacactcttcgcctacaggcacctagacaaagatgcagcgcatacaccattaccacaacatcatggcatacattaccgagttctcttgcactcatgcacagttctgtgctatcctctggatccagttatatatgataacaacaaggaagactccaatatattgcattgaaatggtcactagatggttgtggtaccaaatgaatctctgcaagagcctctcgcttccaaggggtgctttgtttggttagtcaaggataactctgtatggcaacatgatctagctttgagggtctccaccatactgttagggtaaaaccttggctaactccatgttactctcgacgcaagacttgcaccgtagatctcttatgttgcaaataggcatgccatgattggctcatggatgcaggaagcaatctcaagcacaaagggtcaacatgtgactagaatcacatgttgtgactggagtcacgcatctctgagtggagtcacgcttatgcgactggacttgcacatcagtgactcatttgcacatcagtgactcatttgcacatcagtgactcatttgcaactggagtcgcacttatgcgtctcagtcgcagattcgcaacaagcctagtcgcaagtacaccgggaggacactagcaggacatgctcatcagaatagtatatataggagaccatctggccctcgtttcctttccctctaccatgtactactttacttttatacaagcaacattgatcgtcctttcacaacaaagcatcatctatcatctgcaagacacaatagacatagtgactacaaacactatcaaggagtggctacacaccgttggcagcagccaatatcacaacatcttacctaggattgtttgaaagatgcagcactaggtctactacaacggtctacactatgggatatccctctctaatgttctatggacctggtacaaggacctctatgggggatcatccttggagtccatcatgtgacatcacccgggaacattccaaggtgacgtccattgcgatctattgtggtaagtatccccgcatacgacctattggcctgaacgaggtacttgtcgcagtctgcgtgcaaagcctacatgcgagctggttgaacaataatgacagttccttggagatgtatccttgagaggcaaactgaagatgacttcaccccagtatcaatggatatatgtgtgctctgtaatagctgagccatccaggagcacattcatttttacacatgttaccaatgcaagacccggagaagcctctgcgctatcaaccccttatattagggaagaagggatgagagaattatgcagggtgttacgggcgatctgcaagcaggtctctggtaccgtacgtgataggctagtctgggtacacaggtctccatgatgtgtcagggttcagggtatgtgttggtgaagacgcgtgaaaaataggtaagggttcagcgcgcataataaggcgacgtgtatgtctgctacacaggtgcccgatgactgagttggtccgtaacaattttttacgtgacatggtattgcggggtgctgtggacttgcttgctatcttgttggtgatggtctgtaacctgttgtaatgcgtctcttgccaagcaacaaggtaggcgtatgtcgaacgcgataactgcgcttgagtcatctagagatacaaggtcgtttgtactctagccgtactctagctgactcgcgtgcccttatatacttctgcaatgtgttgcaccgttccgcagcctttagtccggtaccgctgttgtgcaatggcctgtggaatctgctgaggcccgcgcctggccccttcacgccctggtgctcctgatataggccccgtgccgtcaccagcgctcttgacggtaacatccgaacttgccctgtgacacagggtcccactccgtctgaccacaacaaatcaccttatcagtgacctgatattatagccttccgcagcacatatctaagggggctatccatacggacacacaaataacatctgacgcagagacgtatcttgagggggttaattggagtggtataatataccatgtatagtggtaaatttatctattgtactatagaaggcatttgtcaacacactatgttatacacacactactgtcacaagtcttagaaaaccctgtactgctgagagcctagcacctaatcgagtccttttccatggtcaatgaattctcagaaagaccagctcagagggagcatggtcaataggtaggtccattggcctgtctataagggtttggcgagagagtcggccatacgttgggagtgccctcttaagagaattggtactgagggattttgatccatgttgaacaaatgtgggaaaagggggttgaaatgcttgcgcattaggctggctgtgcttcttctagctacaatctgcctgagaattgcagcattatttgttggtacaagaggctgaggatactcaggtcaagctagggcaacaatcgttctttgcattcagccaattacttgtgcttgcggtttgtgaccagaatatttacagagtatcgagtatgttgacgataaggcgcaatatctaccgcgatatctatggtcgacacaaccgggacgatccacttcctcgaatcaacgcatactcattctctaaggtacacattggcatcatagcaaagggaaagaagaatgacagctgttgttaagcgagacgaaaacaacaaggaaagtttgggggtttgagtacaacaaggttctattccatactagatatatcgctagactgttaggcattgacaaggtccagaattggaaccggcttggagatagccttcagagacggttttcagcagtgaggtacaagggtgggatatagctagatagatggatgacagttgctgaatgtcacgggagggataaccgtgtgtgaggcaaggtacaaaagattgcttaaccgtacttaagtgtccttattaaaggttacctgtcagtgaagtgacctgaactcttgttaaacactaagtgttgaagagatgtaatatcaacgcttgagtccttcacagcactcaagcgtctcattctacgtacaaacggcacgtcccctctagatacttgtgcggtaccgtaccgataagcgctgttatccccaaaagttcaccttttctccccccacgcattctctccccatctgctccgaataagtaccggaaggtacgcttgatagccaatcaacacgcttgtctggcgaacacatgtgttattcctgtcacgtgtcgcgtctgacggataacgccagaagcgagccgaaggcgtcctgtgacactgaactacaacaatacaagatagagacctatattccaaacatgtcttcttgatacctctccgacaggttgctccaatgaggtgttccgagagcagtctccaaacacatcgttcatagacgttctacgcagaacgcgagagatgctataacaggttcataatcctatccccacgctacgcagtttgcggttcggcatagtttgcaatccgatgtgcaagcaggtttttagtaccctttatatacatactatcagcccgaaaaatatgcatccggcgaggtgccggagtggttaacgggtgcccctgctataaacgcatctagggtatggcatttgtcgcatgtgttcgaatcacatcctcgtcgaactttttgcctcgcatgccgaccttttttatatccgtgcttagccttgctatggattgcttcaaggcagcaatccgcatcggtcttcgtcgcctttagggaatctaccgacttggttttgatcctagttggtctcgtctagcaggcatcattgtcgacccgtttctcaccgatcaccaattgactggagggcggtcgcggttgtttaccttgtccaggctgattgttgcttccgtaactgtccgtaactgtcgcccttcggtctttgcccatgatcgccatgatcccagattagggtatttgcgtttcctgcgattagcaactcgcacgccagccacatcagctactgacttccccattcttgtgctgtatacgatctcatcccgcaagatcgcctgtctctgcagctctgctgtccctctctctgtcggccatgatcaattgggatctcattcagcggatcgtcgacgatgtgcctcctggcaagacgggcatgggggaccttggtgatgcctacgttcgggttctccaacgcaagtgagtggcggtcaaaccagcacagaagtcaagaatcagatcagacttacagctgtgctgactttgatcctccctcactctgctggcagcggcatcgatcacaaccaagacgaagaccattaccatctcctgctcaagatccatgagatgcgaggattgaccattcaatcccgctacgagaactacatcggcaagcacggccgagactatgcgccttcatcgttcgctcccgatagcacgatgctcgaagccaacagcacgtttcacatcggcatcagtcaacgtcacggaccgctagacgctctcgatcccgactctcaagcgaacgtcacagagcagtccaccccgagcagtgctcccgacgaatttcgagctcaacgccggaaaaacgcgactgcgaccccatctgatgaccctgtgggtgacctggtccgagacgatactacgacgcaagaaggcgctagcctggacggtctcacgatcgcattccgcacaaccccactgcttgtcgaccgccaacccggcgtcaccgccgccatcgcctctgaagttgcaacgaaacatgggcaaagagcatcatgggaccgccgcttgacctcactggctcccgccaaagagtctatattgcaacgaatttcgggacccagccccaaccccatcaagtccaagctccccttgctggctgacgtcgactcggatacgggctctgaatacgcggcagcatcgccaacagcacttcttaaactcgaccgcacccacgatggtgacgatgagcttggtcaatcggatctcgataccacacctcgacgggccaaagtagggggattgcgtccacgcgattctgctggtttcctgcctcgctcacccaggccgcatgcgcatcccgcggggtacttgagcgacagcccttccagacccggtcgaatggtcatgactggtcgtactggatacctgagtgacggcacacctcacgccacgcgtctcaccaaatcgtccgtgctgacgcccacttcgaacacgctcggtccaagtggctctcgtctcggaggccatttgtctcctcctcctcggatatcttctcctcttaccaatcctcgagccacgtccacaccaaaagctgcacgcacccgcctcatggatggattctcatctatggaagacgagccaaggacctatcgagcgagcatcccagtcacatacggcgggcccatcaaggaaagattccactcgccgcccgaggtgcacacccgcgatcagggccattcggcacgaccgaccgacgtcccaaaccttcccctaagcagaaatcatgcaatgagttcaactgtcgcgatacagcgagatctcgaacaacaagcctatgagctggatcgagcgtttgctgctgtcggcggcaacgccaacgagctcttggccgaagctcaggcctattatgaagctggggtacgtggtcgcgttatggaacgctggtcggcgcgctatcaacaggaaaaggcaggtcctttccgacgccttttggcgacaacctgcatcactgatctctaaagacctctgatgacagatatttggcgcgtctcaactcgttacttttgatcacttgcgactggcgaagtcattcagtcgatggcgtacgcttcgtgaccgaaggggcgagttgatggatcaggccaggcagatacacgtcgaggctctacaacgccgctcgatcctgcgcatgtcgacagcactgcagaggagaaggaacgaaaccacaagcaacagcatcgttcaagcgcgagaattggccatcaaacggtccatgttcaagttttggaggaaaaagcgcactcgcctccgtgcagatcgatggcgagtcgctatggacgtcaagattcggacgcttcgacaagagcacgatgaacgaatactgcacaacacgttttcggcgagttgctgccgggctgtccgcagaatgtttcccctgatcgctgacaaagatttttcgcagacctggaaagatgctcagctaatacgcgctgctagtgctcagtactctaccctgctcttacattcttgcttcagaatttggcacatagccacacatcagtcgatccgtttgcaagccatagaaaactcgtcgaggttgcgacatgatcttgctagcaaaagaaccgtcctgtataaatgggtcaaatcgaccgcattgagcatgacagccaaagatgtggccgaggacaacgatcgtagagtaatcagaaccgccctttcgaaatggcggtcgaaacggtgagcaagatccgtcatcacggggcacgatcacaaagaatagttcacctgagacgatcgtacatcgagcaggcggctgcatcagcgagcgaccgtattcgctcaaaagcgactgctcaagacctcgatgcggatctggacgacgcgcatgataaatatcaaggtcggcttcgtcaaacgcttgctaccttgtacccggtattgacttgatagacacatccagactctcgctcgaaggtcgcatgcgattggcgtagaaagggacatcacaactctccgatctgcgttcgatatctggataatggcacacacaggcacgattattgcgcgtacaaaggaatcaggcgacctcgagcgagcgtggaaacgctggcgagctaggatagaagcaaacaagtcgatacaaggtgggtcctgaattgacgcacactgaagttccatcccgctattaacaagcagggtcatcacaaatagtacaggctcaagactttacagacaaaaaagacgttggtcacgctcgaatcgctctacgtgcttggaaaaccaaactcgcagcgctcagggggctacaggagactgctcagcgtgcggacaaggctcgattgcttcgcaacggtatgagaaccctcatggaacaaatgggacgtcgaaagcgactggaagacggtgccggcatggcaaataccttcttcatcctaagggcatcgtttcagaagtggcattgcgccttgcgaatgcagaaacagcttcaatggattgctgagagacaaaggcgagaaaaggcggtcgtcttccaaggtaagacgttgctataatcgatccctcctagagtcactactaagctggaaatcgtgctttgacctttgcactatcagcttggctcagattatcgcagcaacagcgactcttgagaaaaaagagtcgctcgctagccaaagctaaaaagaaggcgagtcgatcacgtatcttcccttcaggacgacccgcactgatcggtttcacggtcgctgcagagattgagccggaaaatactgcactactggttcgcaagagtcgtcgcgctgagggaccgcgacattcgaatcgcgcaggatagcgatcgctcccttttgaagcgagtattgttcagaggacaacgatctcaggcatttggtaacgtctttcttctacagtgaatgctttggaagatggacccgagcaacggtgaagcaaggcgagatgttgagcctcatgcagagtttccgggatgttcgtgatcaaggtctgtcggacgcttctccgtcatgagaattcgtctctgacgcatcgtttggtgatagacaaccttcggcaaatactgcgcggttggtcaacccatgcaagatccagcgtactgcgaaaggaatccctcgcaatcgtcacggtcagtgttcaggataatctcaagcgcgcggcaatactacaatggcggtataaggctcgatccctggtcctagatcccatggtaaatgggatcgataatcatcggcaagtgacacacctgattgacctaaagcgccctcgctgtcactctacaggcccagaatttcgtgcaacgtgtcgacgacggtctagcctttgcagtcttatccagttggaaagccaaaagcaccgtcagtggcatcaaagttgtggccaacgcgcagactatcttgctgatctggggggattgctcgctcacagagactgcctgccattgaattccatgccaaaataattcgcaagcaagcttgggatcgatggagagcagccttgcctcacgcgaaatctttgcgcgaggcagcgaagatgcaggatcgcaagctgttttgtgaggccggagcgagttgtgcaattcataacgatactgaacagcctggccgctgtgcgtcaaacagccgatgtcctgcagacctggaaatccgcctacagggccaaaatagcgaggcgtgctgccgcgtgagtcttcatttgaattccatttcaatacggggtagcatgattgaagagctcatatcgtgacatgacccgtagccgttctcgaggaaacgcgatgcgtctgagagcgcctgcaacaaaaaccacagatcacaaaccgccaatttacaggtcacgttatgatgagaaaactagcgacttgcatgtggacgagggtgacgccacagccgcaagtgaactcttacgagagcccacgagtaaccgggcggtgggacgtcggcgatcattgtaccggtttgcggcagagcagagctaaaggtggaatttcggcacattggagacgcccaggagttgtatatgtccgttccacatacgctatgaactacccgaagcagaagggcaaccgtcccggtcacgactgggcgagtgcattatagacctttggtcgctgcattgagcgattgttggcgactatttagtcgaggggtacgcatgccgctcggccaattgcttgctccaccggaaatctcacgctaggcgcaaggggaaaccttaacgaacaacacccatacccgcggaggattcaggcatctagcgcgaacggctccgtgtgtctagctcgcccggctctgctcctgcgcggtgtctaacgacatacgcaggaggcgtactctaacgcacgcaatgccgatgaagcacattgttcagatgagactttgcgccaagctggcaccgccgataggtagacgtgagcgttgactcgtgcagtaccggcgtatataaatatacatagatgtactgggcgacggagcgcgcgtcctaacttctaacatggcaaggaatcgcaatccatctcatcatcgtccttgcaaaatgggtaaaataattgctatcagacttgctgccgccggcttgttggccatttgcggaatagtcgtattggggatctctgcccatgtcgaaaccagtgttagtccgtggcgttcgccatccttgacgtgctcttatcagatcctactgtggtgcaggtccgcaatgtgcaaggcatctcgacttcagtgtacacatttgcagcctttctgggcgccttcacgttgttcgtagagttggtcatggcggccgtgcgatttcggcagccggactccaagcccgcttaccttctgagcgagattgctgtcaacggcatcgtttgggtcatgtggttgggtaagtctcgcctgcgtcgcctggttatttgcgaggctaggtactgaccatattgtcgtgcgttctcagcagcggcagggtcgatcacccacgaaactcaggatggtcgctcaatctgccgaaacctgaatcagctggacaatgttcccgagctagatgaattcgaccccgagatcttaagtcagtcagcttattgagctccgtcacgcgaggctgttgttcaaaagatcccacctgtgcaacgtagggatcatcaagaaggcaatgaagagcgcctgtcgcgagatgaacgccgctctcgccttcgcttggatcggatttgtaggctcgacgttgctcatggtcttcctctttgcgctcggaactcgcaagcacaagagggtcggacgatcggtaagccgcactttggtgaagcgaactatgaccgaaccggatcgctgattggagctttcctgtctcaggcatggaagcaatcattgaactactacgatcgcccgtcctcagaccctttcgcagatcctgccgggaacgctcgagcgttcggtgtcggtgtagtgtctgaagaagacctcgatgcgaaatagctgggccatggtggctgatacgcccgctcgagcaccgatatggagagaaaaactcataagcaaacccagtatcaactaaatcgactgtattctaaatatgtgccatgtctcggattccccgatagtgacaaaagcttcccgcaattacgcaacaatgaaatatttgatgagacgcaccgattaaatcgaatctgcccggtgtcatcttttcggggaagcgagccgcgtataagatagctccgatgatgtagctatatgcggttatgctaaatgagcccaggttgtcgcgatccggctccctggcatctcgattactcacaacgctccgcctccggcgagccaatccacagccgcttcattccttgcccgctttaatcccttgctgagaatgatatgcgcgactggcacgaccgacgaaaggcccagagcgataaatgtcatagtacgatgccagatctgcgcaggggtattgcgtcctggagttaggacagtctagtatgtaaaacacccaagggcaatgcaataagcgggcatagtaggcgatcagaaggagctgccagcgagcaagcccatactcacgtaggccgccatgataccgagtagggtaagggtcgcgacatagaagacttggaagaacggctgtcccttgaaacctaagaagtcaaatttcttgagctttgccacgttacgagacaatcgttgtccatcaactgaccatagtataaagaaggccagaacgaaccttcgatcaagataacgattccgacatagtcgccgcgatgagcactctcgcatctgctcttcgtggtgcactgtaccgcatgaaaccaggcgctcaatccaaggcatcccactgcagccaccaggaatgtacacaaggcgagggagtcgaccagactgtgcgtgtgtgattccctttcaaagaggtcgctaaagcaggctcgcaaccagggtatggcgccgagcgtgttggaggtggtatcgtgatgtgtcgacaaatgcagtggaatgagaaagaggtaaaagatggccccaagcagatgtgtatggatgtttactgtttaaccatggagccgtcatcagtgagcttgaacagaattctcaacagaaaggacatcgctgacctgtctcattgtgccagtctgaaaaggtgatattgagaaaggatgaggtcgagcaatatcaccagaaaagtgtacagaagctcacttacatgctacgagactttggccaacttcttcaagagagactagtttcctcctgtaaccccccctgatgtatatgttgtcagtctgccaaggtacctgaagcagtgactcttcgtatgtcaacgtcttgcttgcggggtgacgtgaacgttctgctgtggctacagagatgattttggggtccgttggagggtgtgatggtcgacggcgcaagccgaactccgaacctgacattagtatctagcggtcgtgggggtcccgtgtagactgaaggtaagtagatgcagcggaagagagcaacgattcagtaagctataatgatctctcgcgagaacgctatcgctctagccacgatcagcgatcacccagtgatggaactcgacctgcttccggttttcatgataaaagcttccggaattctgatcagtcatccgttctttgatgtatatatataccttggaattctggctatggcattcgcctcggctaattgggatcttacgattacgtctctcaacaccttgcaatcaaactcaaacacgccctgagtatcaagtaacaagacactagttagctatctgtcctatcaggcctgccagctatacctctcgttactttacatcacgcacactagccggaaactgggacactagacttttacacttcacccgatatgaatgccacagcagagtctctgaacgcggtatcgaatacgcctactaaacagaagcttccgcccggtatggtactggacgaaaatggcaagccttgcaaagtctgtaacagctggcagacatgggcgaaggccaccaagaaaaagacgacctcagctgcgggtagccaaccgtcgcatcggcaaaacgcctcaaatccggccggtacgacaacgggcagcctcgcagtcagtgcagctgccagtgatatggcgtcagacattgtacctgagcggcctcaagattgtccccccgacgtcaatgcgctgggtcgggcgacatggacctttctgcacaccacggcagcatactaccccgtcaaggcttcccaaacgcaacaaacctctatgcggtcacttctacaatcagttggcatcttttatccttgctcatactgtgcgaccgactttcgagaacgcatggctgcggtcgaaccggacgtgaccgggcgagcggggttgagtaggtggctctgcgaacgtcacaacgaggtcaaccagcgattgggcaaatcggacttcgactgcgacaagacggacgagcggtggaaagacgggccggcaaatggctcttgcgattgagttgctagagcgagccgccttttgttgcagtgacaacgtgtacatagatgcaacaccattcatgcccctaattccatgtatcactagtctatcctcgttgttcagctgatctgccgttgtaaacctgcaccctacacgctcaggcctcccattgtccatttcgtacgtcatccaagacgtgccctcgcataggcgcccggatagctgcttgatcgtctacagtaatctcatgaagcttgtctttgaagatgtattgcactcgcaataacttcttctcgcccatgcaagggtcctgtattgcgagtcgtcgtcgtggtcagctcgggaagcgctccggccctgatcatgcaaaggctaatgctcacgtagaaaccgaggagattggcctagtataacaattcgcacgattagcctcgatgtcacgacctcctttaaagtggtctgcgctgcttacttttccacgtccgcccgagatttgcagcttcccctcgtttacaagtgcttgcacgggcacagtcacgtcgatcactttgtgctcttgacctctcacctcgcgtaggcctgtagacgtgaaagctgtagctagaccgtaatgggccgatattataatcaggccggctagaaaaacagggtgtggatgtcaactccagttcatcccgacggcttagtcatcaacgcttacaatcgctagctcgttcttcctcgacctttctggcaacctggtcctccatcaaagctacggcatcgagtgcctctgctttcttctgggccagatagtctgcgtgttcctcttgcaattctgtcactttgctgaatggatcatggcggtaaccacatgatcagctatgaacgcagtggggtgtgttggacgcgaagccagtgtactgactggagcagtttgtggcgtttccgtggatcgatatagaggtagtgcatcgccacaatggtggtcgccgggatcacggtcgataggagcgcaactgcgggattgagatcttgagacagcatgatcggaacaacgatcttctgtcccaagcgccacatgctgagcatgagtcaaaagcaacgaatcagtggcgttcccatcgtctttaccaatgaccatgctcaccgtattcgaagggtgatacctccaggaagagctgcggtcacaccgagacccaatctggtcgaatccgtaatttgacgctccgtattcacaaagccattaatgcctcccattgtgccgatcgcagccccgaccttgaccttgaaaccgtccaagaccttgaaagtgtagtcgagggagatgtgcctatcggcaacacctccggtggtctcgattgtccagccacttccagtatggccttgattcgttagaccgaccgacacagccgctcgatcgctccgcccaagagtctccgcgagtccacgtccccaaggtcccagagtccagaagcccgaccgtacagctgtttccagagcaagcataagtcaaaactgttacgataacgcagtctctagacagactgactaatgaatccggtcgtcttgggaagcaccttccgccccagggtcacagcgattgcaggaggggcttgtattgtctgctgtacgacattcatggtagcgaatctgaaaggtacagacaaatcctcgatcagcggcggaaatcaggcgtgattgtgtagcccttgaacccacgtatcctggtcgtacgcgaatgtagcctttccggtggctactcgcgggttcatcatactggtcccagcctagtcgataatgtccttgagcgcaagcatagcagttggtcgggctccgggcttacctcaatccacagtcttggtccgaaagcatgccgcaaggtacccacgacattgcctcctcctgcgccgttcctcgccatcatttgaccttgccatatcagcgaggtctgtggcgatatgggagtctgtggtgagaaagtttcgcctcagcaaagctccttcgggatgcttgaacacgggcagataatggcaaactcacctcgaacgtgtgcttgagactcatgccgcctactcgcatacgtttagcccggctcagagcatcgtgcttgacgattgttggatccgcaaaaaaagaaattggcaagaagcaagcccgagcgtctatgttgactgagacatctcccttgcgatcccaagagtgatgttaggttcgcataccggatggaggtggcgatgatcaatactgacctttgtcttgaccatcgcatcgatggaagctaaacgtttctcatagatcactcgctgataatgtcgacgaatctgtgcattcaggtaagccacgtcagcaccgccttggacgcacgggatgatttggtgctcactccttctggcgagcccagacgcctaatcaatttccaacctgtccgtcgacctccgccctctccgccatcgccttcctcggtatctccgatttctctcaacccagcctcacccagcatgtcgtaaacggctcgtttgtgtggatctgacaagatggcgtaagcttgctggatgagagagaattgcgtttcggcagcggcgccgtccgtagaattgagcgcattattgcgatgcttgtcaggatgaaaagcgatagctaaagatcgatacctctcccggatttctgcggtagtagcagtcttggggaggttgagcagggcactgggaagacgggaccgcgagtcagctagcggaatcgatgacaggttcgattcttaatcgagactcactagaagctctcgttttgtacctccctgagaaccctctgcctctcgcgttccgagtcctcgaacacgggctgagcagacgtttggaacggatccgggtcgacgctggtgtcggttgtttcgtcatcgggattgtggaatggcggcaagccatcgggagttcgagcgaattgactcgtataggcggaagatgcgccctgattgtcgtccatgtcggacgatatatgacctcgtgagcggtcagctgggaatcagaatattctaatccagaggtgatgctgcagggtaatcccaggcagttgcgcagaggttcgtgtgaatgtcaacgcagatcgtatcgtatcgccatacaattgcgttattcaactacagcgatcggggggtctttgaactatgttatgggtggaaataaagttccaaaggcgaagagtattacatccgaaatcatggagacccctcgtggtagtctgggcgtgggctgggtgaaccttcggaatcaaattacattctcgctcgggcgagttggggtctcccccgtcccgttatcgaacgcgaccaagaagcaagaagacagttacatggatcatggatcaacgaattgtagctattgtaggatcctttgagatacgttgttagtagtcgtctcattttctcatcttcgacaattggacatgagatcaagaaaggtgaacacgagcacatgtcattgacctcgcatccgcctgatacatcaatcgtcgatcaccgccaacctttgccaagcggactggattcttcgacttgaatataccggcgcaatagctcagatagctcttagtcttctactcctggacctttccacctcatcaatcattctctatcagagtcgttggacacatcttcacatgagttcgtaaagattcccaagactcttcgacgattcgcctaccatcggatcacaagaccgttccttcccttcaagtctaccatcgacatctataaatcatggacgagacgcagccccaaagggatcctctcataacagcttctccggtttcttcggatccctcaaagtcgaaaggagggaatgacgacagcagcatcacaatgcctcagcaagatgccggtgcaccagagtctcacgtcaatgtgtccaaagaaatgcccaatggacctggagacctgccacgtatccaggatcctgttcgtaccgttcgctaccggggcgacaccgatcctgctgctctacaacaagacgatccgggccgaaacgacaagcaagataagcctactgtcaataggcagccgcacagctgtgcggaatgtaagtacatatgtcatctggtgatcagcaaatcgtaggagcttacgccccatctccgctgcaaaataggccgacgcctgaaattgaagtgtgatcggtacgtgggctgcgcctagcctttctcgataggcttgccgctgatttttgcttcgatattgtcgtagggtgtggccatgcagctcgtgtcgtagaagaggcgtagatcagatctgtccgaatggagctatgatggggggtaaaggtcgaaggtgaacaagcttccgttatcgactgtcttttgcttgctgatccatctcgcatcgtcacacagattgattctggcctctcatgccgaattacatggccgcattgccgagttggaaaaggctcttgctctagcccacggacaagccaacgcgactccacatgaactgttgacaaacacgctcttgtatagcccgagagaccccaagagcaacgtcgtcgcagatcagattgctgaatcctccaagagaggttcgggagaaggccttggaccggagcggccatcgcgggctttcaagcgacggaaatcgggcaaggacgcggaacaccgtatccataggcggcagactggggatgaagctggagcttctgacgacacggacagcgatcacacagatcgagataacagagaaagcaaaccatacatcaagtcgcctcaggccgaccggccggatgataggctggaagctagcctgggaactttgaccattactcagaatggcgaggctcgctttgtcgggaacgctgctgcgagctcccatctgaccgagagtgaaggtgggaacgcgtaccagactagattctcgacgggaattcagcctcgatcgcacggattcactcatcaaggagcagagactggattaggcgatttccctttcgctcaatctcttacctcggatcaacagagtctcaccctacatcagctatggcaaagattgccagcttgggatagtgatcccctccaaggtcttacttccggtgctgcatattctcgagatttcctccagcaacgccatatgctgggaagtcggatcgcaatgggcgggatggacatgatcaaggcttattgggaaaacgtcgactggatgtacaatgtcgtaccggtgcgataaaccccctgaatcgtctatagcgctgaactgatcaaagaccacaatttcagagggtcatctttgacaacgattatttgccaagcgtctatcaatcgacggaaacaccaactgcccacaaattagcggtcgtctacctcgtcatggctcttggtgttatgtttgacttggagcggcgagagcctcgtgagtgtagacccgacaaagtgaacgaaattatccagctcatgaatgagacgtccagatgatcccttggctggccaactattccgattgggttgcgcttgcatgaccgtcgacggaggtctcgcgagagcctccattgctaccgttcaagcgctgaccctcatcggcaactatatgctcaacgataggaccgcccacggtgccaatgcgttctggccgatcctcggtgtcgcacggaccacgattacggctctcggtctgcatcgcgatggttccgcgtttcagggactttcgccctacgaagtggaggaacggcgtaaagtgtttcatgaatttctggcattggatcggcttcaatcgatgtgttttgcgcggccatgcgcattgccaaatcgagctttcgataccggatttcctggagcggcagatacttcgtctgagcatcgattacctgacgatgatcgcttccacgaatccaaataccggctagtgcttctaatggaaaaggtcatcgacgaacagacgagaacgaccacaggcagttatgcgcatgttttgtcggtcgatgagcagatactgcagtttcaagctggccttcctgaaagcatgttgccttcagtcaaggccagcgaacttagtatggatcctgagatccatccacacacggttctgtgagcaattcagaaattgtgccatctcggagcttttcgcaaatgcttacccaagctcggaaatgatcgtgcaggcatcgcttcagtattcgattactcggtatgtgagccgtttatttgtgaggttgaacgagctaggccttaaaactcccaatctctatcagtcttggagacacgaatttatcttcatcgcgcttcctttatccaagcgatgcagcaggtatgctgtagcgacctccatcatcgaggcgtagccagcctactgactcgccatttcattccgcagaaccccagtgatccatctcgtatagatcaacgattccatcgatctttcatggctgtcttcgaatccgcagtggagttgattagcatcgtcaaacaaatggtcattttccatcccagcttagtcgcacggtaagtcctccactcagcctgcaaaccgataacgctgttagtcggtgacttgagccgccatgcccttggtacggcagttggtggttttactggttccatggttttagcgcggctgtatgcttgggtgctatatgcattcgagctcccgcttccgcattcgcatcccctgcgtacatgtccctggtcaccgcttgtgatctcgcccaagcagcagtatcgggtactaaagcgaaatccggcttggtgcgtttgggtatttgctgctgctgttacccatcacctcgctgatatctatctgctcgacacagcccgctctgcagcgactacgtcaaaaggcgagcgatgcgatcttgaaaaacgcacaaagcacccacgctgttcacatctcgctactagctgcgaataacgtcgatgagccggtaccgcaggatgatctcgctcatctaggcgacgtccgggctgtgcggcgtgttaacgttgcctcgcccgtcgtgtcaactccggccttgaccaacgaagacagtagccagatctcaagttcggggagcggacctacttcgatcggcgagacccctctggctggccatcagactggatactatcctcgaacttatctcaacggcgctagccacgatctcatgttctcggcaggattaccaggcccaaattattctgatacgagacgccaaggcgaagatacggacagcgaagcgtttggcaacacaagcaggacctccgaatcgcttattgaccggcgagcccatggccatgtaactgagcggcagcaaacggagtggcaccctgggtttatgccagatatccctcttcgagatcagattcgctcgccagacgtcgatcggatcataccctcctggtttcagcaaacgtcaaccgatgcctccttcatcccgagcgagtatgaagatgcgacaaacgacttcagacacgagcgcggtgaaatgcactatggacaggtctttgcgtctcacgtctctccggatacaagggcggggctcatcctaccattcgaccaactggatgcttacgggatctttatgggcagacacgatctgatgacggaaagtggattcgaagagcagatgccgcttctccctgggaccaatatagaacagtttctcgccagcctagatcgtaatatgacctgatttttccaggcagtcgtcgtcttgcttatctcgtcgatgcgcaacgcaaggattacaattgtatcagttcctgacgcttgttgatcggtcgaggtctgaggaggatcggccgcagttcgtgctgtataccatgaaactgctcgtgtatctgtccagcggcggcagttctatcgcgacttggggaacactctgttatattcgtccgctatgaaccgctcactatgacgactttaagagatttgcccccaacaagggtgcgtttgagttcatccccgcgaaggagcgcttgaagcgagcgttcttcctacactgtctagcgaaatctttagctcaaggctaatcgctccgaccgaatcttgtgccgagcgcggttgcacaggggataaaagcaggcagaagcgttgttcacatatctgatggagctgtttctgaactcattaattctttccagcacaatagccaagtacctttcacgatgatgctgcgctgttttagccaccttggcgacgagttcgcaatgcagggtctgaaatccatcgaagatgagatatccatgccccgtaactcggatcgaccgctagacgtggacccaatcgtgattttgagatcggtcagcgtcagtaatgcggatatcctggctcgtgattggtacgttacagcttcgctggacgttctgaaaccgaacaggttcggacgtttcaagacggtaaagagcacgaacctttctgcgcgttactccaaaaagtcatgatttactcccggaatgatttgatgtcttattcgagtggttgctcaattgctcagctgcttgccagtagtattcgatgatcttatagctgtgcgaggggaagagggagcctttcataagcagtcgaagatcccgcttttacgcaaaaagatttcgacgcgaaaaaagattttgacgtaacggtgaatcgaacaccgatcggctgctaatatcccatgataatggaaggcagtcattctaccattgaaccattacgtccggcataaattccgtcattaaacttttatatgatccattaaagtttcttttttgatctcacataaacaagaaatcatgcagcccagtcctctctcctaactgccgtttccctcacgctcacggctgcctcgccgtcgtaccagtcaatttctgtgcactctaccacgtcattgcgttctacccaattattaattacggaaccgaaagctaccggcggtctttcgtcttcttcagtagagtagtacaccagtaattcagtaaaatcaaagccgcagtctatccggtggtcgcgtttgcttccgtgtccatcgaactcctgcccctggcccagctttcccgctccttcgcgtttgcgaagcattggctcgggacgtcggaggcctcactctgtactctgggctataaattcggcccctaccgtgcatgagatcacctttacgatctgaccagaatcatctgccttgatttctgcccctggaatcttggctatactccgaccttcattaagctcgggttccccagcatcacctcaatcgagctcaaacggtccgctcccagcgtgcccaaatcccagcatcgcgtccacttcctcgcgcccgttgtcaccttcgaattcgaagagctcatcgggtccctagaatacactcagcatggactgtgccctgccaatctgttgataacaagcctataccaactatcaggcccggccttagccggtgtgattaggggacatcgcgagagtcactcctcgacgagcttggcggcctagcttcctaccctgttacagctcaggacaggccttccttgacagtatgccacgcattcctacacgtacagagccatatacatcgcctgctcgacaacatcggcattacaagaccaagcgggaccttatacttcgctctctcggtaaggcttcctacatcaacggatgtcagttcgcggtatccttcatatcggcaagaggagatgtcgaaatgtacgggagcgagatctgtagcgaacggctaaatgaacttttcgacaaatcggttctggacgatatcgcagctcgtgtcaaggatgcgagtgaaagacgtcgagaagaggccgtccgtactggcgatgcgagtgatggtcgacgtgaagctagcgtcgagggtgttgagagggaaaggaacggcaagctcatcagcgtggctgccggagctggcaagcgtaaagctggccctggcagaccagtgagcgccgaggacgccgatagtgatgccggaggagctgcgagctcagaaggcgatatgaccgactgcgacgatgatcccaataatgaggagctggaagaaacgcaaacgtcggtcaactttgtgcccagatcaccgacaccaaatcctctgactcgtcagcgaacttcggttctcatggaagcgtacatgaatccgcatcaaatggcttcggcagcggggatcagtctcgatcacattcagcagccggagcttagcaacgtgcatcaaggcgatatgaatgcagacttgcagtccccgcttgctacccctattcgcaacgtggcctctcagcgccagtttgacggcatctacgataccccggacatgtccaatcaccggcacgatgctcaagtgaacggcatgatcactcctttagggttaccggtcgctgcttccgcttttcaactaggcagcgcctttgtcactcctggcgtacagcgatcccgctccaacactagcatctcaacgaatccacttcttgctactccttcacagtccgacatggttccggtctctccgcacggccaggttgtttcgatcgctccgcacgagttgcaccaatggtacacgaccaagtttgatgccttgcaacagcaaacctgcaagatagtcgtcaaggcttggatcaaggtcatggaaccaaaaaaacagactcgcttcccgtacaacaaaggggaaacaggaaagccgccttggtggccacagggtgttcgtcacaaagaaccagatcatctgatgaagcctggtacgtttacgaatgaccctctgcagagcgaagtctgatgatcctgtatggtgcagagcgaacggacctggctatagctattttgcggtcgaatgatgtcaaagtatcgcaattggagatctctaccgccgtaagttatcaaacggtgcgattcttggacacgtcatttgacactgaccctaaatttgtaccggttgcaatgccctgcgttctaggaaaatctggcgtatatcgtgcccggaaagatgagcgtgctgcgagagatataccgggccgcaaaggaagacgagcgaatgagggaactgaaagacggtacgacatatttatagcttggcaaacgaccccaaggctaattaggcgtcgttcccttttcccctacgaagccacgagtgacatcgtgatcagcgtctcgaacagccctcctccttcacttgcaaagcctagcagagctagttctttcaaatctataggcacaacgaccgtcaagagcgaatatccggcaacgcttccgcgagccaatctgcgcgctctaaatatgcctttcacctcatcaccgattgcgtctgcaagcgggtccagcagcaccatcgccagctcacatagcgcttccttcgagagaaatggatccgtatcgaccgcgaatctgagcgttgccccgggcgctcccgccttgaagaagaggaagttgacgcaaaagacatcgctatcactggacgatcggcgggtggcggctgatcaagaaaacgtggatccatgcacggctcttggtcttcagatgcctactccgacgaaggcgcccggtacgaacaagcgcgtccgatcgagcaagaacccgggaccgattgctatcggtacggtccagcttgacgaccataggccaaacactacgctgggtgtgaggacgggcttccaatctcgggataacctcatgtctctggcaccttcgccaatacccggaaattccatggcggtgcctcaatggcaaagcaacaactggccaatggaacacggcatgatggctacgggagtaccggttgtcctaaacaatgttgctggcccttacagtatttatcccatgcatggccagtcaaacgggtcggcatccactcagggctttcacaattcgccgaacaccgaaaggattcacagtggctcgtggcttttgccttccaacccaacaccacaatcgcttcaacaccccataggaaacgcatcgtttcctgaatcacataattcgatatcctcggggcggcctgttgccggccggtcctctcagtcgacatcaaacaaagaaagcaggagagtgctgggagaaactcgctctgccagcaaccaggtttctctgacggattcgagcacccaggacgctttctcgcacggcttcgcaatcagccaaatacccactactaatcaactgggatttgcattctttgacgagcagcagtcgcgacaacatcaaaaccatcccacccaataccagccgtcgaatatcgctgcggatggcagctattctgggctgagacctcgacccgcacgactcggcaggagatcgtcttctgattgcatttcatgatcagaagagaaaaggtcactcgcttgacgaactggccgcatcgcttatccatcttggggtcaaggtggaaatatccggttgtaagattcgttagatatccagttgtagcaggtcgaagatgcaacaaattgcaaactccttggcgtggccgattacgcatgtggcctccgcacggtcagggtttagcaggctagcttcatgtgggtatcaaggttgaacgggatactatggatctgtccttgtgaagtagctccgggcttcggatgctttgatggcggaatcaaaaaaatatcggcaggctcgctcgaaggcgaacgatcctcaaagactgtctagcctcgtctctacgagatgtgatcaactagattgcagcaatcactctctcaagctctactgcagggctgggattcatctccataaatacctagcactcagctgtctttcttccgcatatctccttcgagaagcctatcgaccagtggctcatttccggtcatccggttgccgctgaaaactcagcgagcaaagcagaatgtcagaacagcagagccacaaggctcaccgagcttctcaatcggggaaaaaggcggagaagaaggatgtcgcacagggcaaggataagactgggggacaaaagggtttcaacgaaaaagtgagtcatctaatgctctgaaactcgatgtgactcgttcttattacctgagtttcgtaaggctttcacctcatcgtcgttccgatccgccaacttgcaagctcgaagagctgcagagctcgggcaacagcgacttcacgtgcctttggtcaaccgtacacctgccgagaagaagctggtcgctaccttgaccccagatggcaagccgatacaaaagtcggagttttcgactgcacctcccgcgccccctatagttgtggcgatagccggacctcctggcgtggggaaatccacgctcttaaaaagtctcgtcaagcggtacacgaagcagactttgcacgatgtcagggggcctgtcacagttgtttcaggcaagagccgaagaatcacctttatcgaggtcggcaatgatctcaattcgatgattgacgtcggcaaggtcgccgatttgatccttctcatgatcgacggttccttcggcttcgaaatggaaacgttcgaattcatcaacgtacttcaggcgcacgggttcccaaaagtagtcggcatcctgactcatctcgacctcatcaaaaagagcgctgcactcaaggataccaagaagcgaatcaaacaccgtttctggactgagatctaccagggtgccaagcttttccacctgtctggtgttctcaatggacgttatccggatcaagaggtccaaaatctctcccgtttcatctcggtggtcaagttcaggcctctcgtctttaggaatcaacatccgtatttgcttgcagaccggatccaggacttgacgccccgcgaagcggtcagaatggatccgaaaatggacagaacagtcactctgtacgggtatctgcgaggcatcaacttgcccgctcggaatgcaagcgtacacatcccaggagctggagatttgacgatcaagactgttgagcgtctcgccgatccatgtccgctaccaaccttggaaagcgagaggaggcgaaagatgggcgaaaagggcaagctcctgcatgcacctatgagtgatgttggtgggatgacatttgacaaagatgcggtctatgtcaacgtgatggggagttttacaagaaagactgaagacggtgaagcaggtaggtcgcatcttctgccatttcgaatgtcgtgtctactcctcgatgactgactgactgcctgctatagaaccccaaggagaaggggagcagatggtaatggatttgcaagacgcaacatcgacgctcgcagacggtatcgccaaatcttccattaggttgttgggatcctcttccaaggccttggaggtcggtgctcaaggcagaacgcgccgttcggtaaacgtacctatcactactgcctattccggggatacggaccggtacgatgattcggacgacgaagatgaggatggctcgaacgcggatctgtttgagtcaggagacttggatctttctgacagcatggtcgatgatagagcttccggatcgagccgtaaatcgttcggtcgccacgaccgagcaggttctgagggggatagcagcgatgaagacgatttcgatctcgccgacatgaccggctttgagcaggatggtccggccgtccgggacctcgacatacagtatgccgatggcgaagcactcgaccaagagaccgatcagctgccatcagacgcacggtggaaggcttccattggagatagagcaatcaagaatcaggcggacagacttcaaggtcgtcgagatctggcttcgttgatctatgacagtgacttgtcggcgaacgaaatctgcgaaggcaaacacgctgcaaatggactgggcggtactgttgcggaggacgatctgttcacaatcactcggaaaccggtgatctcggtggctatgggctcagccgatgactacgccaagcgacatgtggctgcctcaaccttgagaggccgatggagcgacgaggacatgctcgattcgattcgacacatgttcatcaccggttccaaagaccaggtcgatcaggcggatggcgagccttacgaggaggaaggaggggattacgaggatctggaggacgcagctaacgatgaggaggccggggaggacgttccatacgttggttctggcgggacatccttgcgctcagccgaggaagcgcgagctgcttcgttggctgcaaagaaggaagcgttgaagcgcaagtttgatgaggagtacgatgatccggaagaggaggaaaaactagacttctacgacgagcagaaggctgagtttgctcggcagcagcagcttaacgacgaggaatttgccaacattgacgccgaatcgcgggcacaagtggaaggttatcgcgcaggatcttatgtgcgtctggaaatcgaaggtgttccttgcgaaatgctcgaccatttcgacccgcgcttcccccttatcgtaggcggcttgctggcggccgaggaacgattcggctacttgactgtccgaatcaagaggcacaggtggcataccaaaacgttgaaaagcaacgatcctctcatcttttcgctcggctggcgaagattccagtccctcccgatttactctcttgacgatcactcgattcgaaatcgtcatttgaaatacacaccagagcatatgcactgttttgctaccttctacggcccggtcgccactcccaatacaggtttctgcgctttcaatacgctgtcgggggaggtgcctggattccgcatttcggcgactggtgtcgtcctcgatattgacaggaccgccaaaattgtcaagaagctcaagttgaccggcgcacccttcaagattttcaagaacactgccttcgtcaaggacatgttcaataccgctctggaggtggccaagttcgaaggtgcaaacattcgaaccgtgtctggagttcgtggtcagatcaagaaggctttggccaaacctgacggagcgtaccgagcgaccttcgaggacaagattctgatgagcggtatgttaccccgagactccggtcatcatttgcttctcgcttacgagagttgacttgcataatcgatagacatcgtgttcctgcgagcatggtattcgattgagcctcgaaagctgtacaatccggtcacatcgcttctcttgagtgacaaggaagggtggcagggaatgcgtctgactggtcaagtcaggcgggacgagggccttaagaccccaaacaatgcagattctgcctaccgtgtaagcagcaatgaatatttgagaatatgagagaagagagctcacgcttcgtcctacagcctgtagcccgaacgacgcggaggttcaacacgctcaagattcctcgcaacttgcaagcaggcctgccctttgcctcgaaacccaaagtcgctaagccgcagaggaatcagacgtatatgcaatcgcgagcggttgtcatggagccggaagaaacgagagctgtggcgctactccaacagatccaggcccttcgcaaggacaaaggtgcgaggcgtgacgccaagaagaaagaacagcgtcagcagcatttggaaaaggttgccaagctggaaagcaccaagatggataagcgtaaagacgacaggcgcgaccagcttcgtcttgcaagcatcaaatcgaagcgcaatgcggacaacgaggggggcggtcgacccagaaagcgcaagcgtgagacgtgagacgaatgagaggccgcatatgctacgactgtatagaagtatgattcaagttgatgtaggcggacgtgcccttctgaaggtgatggcgtcgtactctagaagacatcgacgcaaaaatcgatcagaagaccccatttatctactgttggcagaccgattgtcctccgtgttcgaggcgtaggtataaagtattcgaccccaccgaaatggccaggcgcatttataccctgtgtttgacatgaaagacaatcaagccctttaggtagagacgtaggagtccatcagtggcaataacatccgtttgaacaacatgtatcccttgctcctgatccttatgtttctttttggagataggggaacgatctcagtgcttggggttgtggacagcacaagggctcatgccatgacttgagaaacaccaacgaaaaataaagtcttgtcacgatgcccaagattaagtccgcaaaacgcgcaaaaagatagcgcagtgccgggatcgaaccgacgacacccagattacaatcaattgtgttgtgtaaacagaccatcgaagtctgatggactaccactgtcccaaccgcgctgctatgtttgatcatgagctcaccataataaatcgtaatgaatttcaatgccttaatctttcccgtttcacttcgggaaacgctcactaccgagcaccaccggaagcctcagaagtagcaaatgctgcacgttactcaagatcaaggtccgctcagcaatctgctgctaaagcgttggacggtcaactggccatggtatcacacaactagagcctcaaccacggcaacgaccgacttgcaagtcctattattggccgagttagaataacgtctgtggtcaacgccgatgatcagcctgtgagatggaggcgatgccctgctcgtgtatagttccgtcttgtgcatattgaattcatatagatatcgcaactacatacaataacccatgcctatgcgcctcttctgtgacgtcaaaatcctacccccaaacatcatgccgacgtccctccgcctccgaaaaactccctgatacccttttgcgagctatcgtacgccgccgaaccgattccgcctccttgcctcttgacatcatccaagtgagtcgagacgttggtgcataggatcttgatcctcaggtaaggcttccttccggacctttccaacgctggcgcccccggttcggtggacgaagggttcgtctcgggcttgctctctgggctggcaatggcagcaaccttggtcgtctcttccggctcgtcctcgtcctcgtacccgacctcgatcctcgtccaccccgtgttggtcatcccgccacccttccaatgaacgggctcttcatgaggtgcccgtcgagccaaaaaggcgcccaagagctcggcgttgaagatcccgtgggcgacgacaaagacgtgcggggcttgctccctcgttttgcccctggcttcgcgcatgatgggttcgaggaatgaggcgatactgtgacgagagaattgcggtccacgtgtcagggtttccatctaatcaaggtgcgaagacgccgctagactcacgcctcctcggccctgtctctaacatcgctcaaggactctccgttcgggaacttgaatgtccttcccggctgcctaaagtacccattcccaccctcggttcccgtccagggttgtctttcggcttttccgaaatgctgttcctgaagcaagggcgagagcgtcaagggcggtttcggttcggtcttttgttgacgatggatctgctgggctgtccaggtggctcgcaagaggttcgaggcaaagatggcatcgatgtggtatgattccaaagactttccgagagccatggcttgctatcaattcaagaaaaggtggtcagcgtaaagacgtatagcttagcaggcgaggtcgtgtacgcctcaaggaggacctacgttcattcctgcagtggcaacccatggatcgaacctgcatcagctccgacgtcgggtatcacagtctgtatagagcaacataccatgcgtggacaatggggcatctgaagaacccgcccaacaggccttgaggttgtctgcgagaccacgcacgatgatcgggatgtacgtcagtcgaccacgacactggggtggctagaggccggaggtaaccgacagggtcacgatggtggacttaccggtggattcaccgtgacgaacgatggtaaggatgatcatgatgggcggtaggtagttttatgtatatcagtggacctatcaatagtggtagattacttggagatgtcgatgatatcgatgatgatgaacgatgatgatgaggatgtcgatcacccgattcccaggtccgaggatggctcgtgctcgctttgaatgacgcgtctcgctcgcgtgggcggggcgggtagagagagcgaatggaccgatatggttgtcgaaatggacctacacgggtacaaggtcgacaggtcgaatcgaagacatctcggagcgattttggccaaatcgttcgcttgaccagctgagttgtccgaggagaaggactcgtccgaactgacctatactgagccaccgatatcgcgttcctgcacgggtctacaactcgtcgtccagtatcgtgtccagtagatcagccggcagggtcaagcagccgtaattgtagtatcgcccaccagcaaggcatcgccatcgtcacatgtcggcccatcctcagatcacaaaatcacgccgagcccaatctcgaagcacaaagcccgagacaagaaagcgacactcatggcggcacggctctttcttatcccggacggaaacgatcattgacatcctctcctgactgcacagaccgaccgacctgctcgcctctcctgaaagacagagagagcgtctcgtgttacaagaaaaatctagcatcaagcgatccgccaaatgatgattcccatgtccggttacatcgtcattttctctacagagaaaccctcggggggaacggctgggtcgctatttcgcaccccctcgcccgatcccctctcgtcgccgtcgtcctccctcgactgcaaacgcacgcaatacacgtcctcctcgaacgcgcaacgtctaggcctcgatctgagcggtcttgcccttgcccttcttgtcggtcatgacaacgtcgtccatgtccttggccctggggacctcggcaccgggggtggcgaggatgacctcgacgtgacaagggtgtccctggtaagggttgattcgaccgtgggccctgtaagtccttcgtcgggttttctaaatgatagccaaggtcgtcgcaaaggggtgagtcattgtcgtcagcttggcacgtccggcgaatacagtcatcactaatgtccacggggaaacggctactcacgggagcctgttgcacaacaatgttcttgataaccaactcgtccttctccaagtccttggcctcggcgttcgactcggcgttcttcaacaagttgaggatgaatcgaaccgacttctcgggccaacgtcctgtgaagaaaacgagacgcatgatcgatggattagtctcgacgaatgagaaagatatcagcttggctcgatgctctagactcacccttggtggtaccgaactgcttggcctgggtggcacgtccgattcctccagcgaaccttcggaaaggaatgacctgcttgtgctccttgacgtcggacaagtaggtgtaggccttctggaggttcatacctgcagggttgcggaaagagaaaggcgagtcgggtctcagcgtcggaaacttgatagaggcagtctcaacggcctgcgctgagtgtgcttaccgttcaaggcagcggcgacttctcgcatgttcttgaagtgggtcgagaggtattcacccctggacttggagactgttgggcgccggggtcgaacgataccgatatcgatggagatgggaagcgatcgtttatttgtagccagtatcgtatggtggtgtcgagagtaatgttgtgtgtgaggtgtgacgggacattcatatgatcgatcgcaggtcgtgccggttgtcgtcaggtccagtcaaattttgcgtccccaagcatcggccccgtccatcatcccatccagaatttccatcatcccattacgagtcggtcgccagtcattcaaccatcgtcgtgattcccatcatcgtcatcgtcacagtagatccatccagcatggcaaaacagatccatccccagagcgtcaaacaggccaaaattgttcaatagatagactgcatcagtacctgcatctcaagcccttgccgatcacgaccgctcgacacatacactggtcggggttgccggcggcgacgtgagcagaggcgtatcgaaccatctttccaaattcctatagattgatcgagagaacgagagtaaaagtggtgtgtagagtttagcgacctgtgacgattttgacgacggatgatccgatatagaggcacaaggaggacgtcaacgtaccctgtccctgtttttatttttttgtggtggagagtttgctgctgagaggaagagcagaaggtcacgggaggggggcgctgaacgtggatttggatggcgaggtcgatcttggccgtcgtcgaggtcaaagtcgaggtcgtctggggctgcctctgcgctcaccgtatggtagctagcaagaggctaggggaaaggtgtcctcccgcccaaacctggtccagtgcgagccccagccccagcccaccacacggagagcgagcaaccaggcccgaccagcccgctcaggagttcacgagagcgagcgagcaggtccctagcctcgaacgggtcgactcagagtccaagctcacatcgatcgcgcaacccccttgtcgcgcgtacactaactacttggcgtcgaacagaaagaagcgcatttgaatctctttgcgcttcatagccttcgcgtccagctcactcgctctcctccacctcggtcgatcgcgtaagtccccacggtaaacgccgatacaacgcagcgtcagattgcccctcgcctcgccagggaccgaggcaaagtgccacggcgatcgtcgggtgaaaaggtgaacgttgtttctgtagagcgaagaatgatcatcgcttgacgtatggcgatcgacggaccgacagtaagtgtttcatcaacactatcactccatcctatagagaaacatcactaccaaaccgaccctaccaaacgacgaccaccacgcacgtgattcttatgcacctctcgacgtatatattcagactggatgaaactggatgaattgccatcgacatcgggcagtggaaacaatgcatgtacagtgattgagattgaagataaaggtgatacattctcaagtcgagcgtaatgtgtatgagagtgtgtatatactgggtcaagggcttgatgtgatggacaagggatgcggcagtgtcttgatcaggtcggtcgtcttgtataacccaaggctcggcgaacgagtcgttagcgggtataagtttccagttgagaagagatgagaaaggtagggtcgtcaatgtagctgtacgcgggtactggcggcagttgaggtggtcaaaggcgttatcggcaagccaggccagacgcgcctagtcgaccgagatggcccatctctccaagtcctccttggtgaccttactctcaacgatccaggggtaaagctaagggtaaagtgttccatcagtccttgcgatccagactcactaccgctggtcacgacggcgggcgggcactcaccaagagttctttaggcgacttgcgctccgccggttctttacgcagacagtcttcgacaaaccgttccgcttcggtggggaacttgccggccggtaccaatcggggtgcaggttcgttgacgatatgctgtagcaagtcgaggatgctcatattcatccctccacccgcttgctgttgtcgaggaggtctcgccggcctgtccttcttctcccgcgcgctctcccggcccgtgatcgttcgcctcatctcttccaggtcagagtcgtcatcatcgtcatcctggtcatcgtcatccataaaggggaatcgcccaagggcgagctcgatcaaggagatgcccaaggaccaaacatcgctcttgacagagtaattgccgccctgaatacgttccggctgtagtcgagcgagagatgatatcgcccagattcgtcagcctcggctcctttcctagagaacagtccgacacgacctggactcacgctcatatatgtgctcgtcccgacaaacgtgttggcgaccgagttgatgagctctcccgatacaccgaaatcgcaaatcttaatatcccccttggagttgaccaggatattagacggtttgatatctggccatgcaatctcctccatcagcggaggcttcggaacgaattggacggctgacgcacctcgatgcatgatacgatgctcgtcgtataggtacgtaagacccctcaatacggcctctgagatcttgccgacaatgtcgatggacaccgcgccatgcttcttgtagatgccgtcaagcgatctggcgatgagaagcagctctggcgtcagacccggaagttccatcgccgcgactggttgtcgaccctcatcgaccctcaccttcggtccatgtattccatacagatgccgacatgtacgtcacacaagaacgctccgtagaacgaaacgatccattccgatgagcagtggtgcatgatctgcaactccctcaggatctgtttccgcacggccggtttggcgtctatgaggaccagctgtcgcaaaattgacatcaatattattgtgacctgattcgtcgactagtaacatcgacgcacctttttggccatgtacagtccggtctctttgtgcaagaccttgttcacagtacctccattcccagcgcctagatctccaacgaccttgaggtcttcgtctctcagctccgggaatccatgccccgaatctgtcccgtttgttccattcttgtccgacttcttcctcgtcttcttgacggtcggttttgagctcccgctggcatcctgtttgctaccagatcgcgaagatgacgacgagatctccatgctcgcgagttcccgttccatctcggctcgactcgacatggaatgcgtcgaagctgggctaggaatgtcgccatccctagtggacgagcttcctggagcgtcgggagcgggtcgagtcgacttgattcctaatccggccggctttttcctcgataccttggacaccttgggcggcggcatcaacgtgtcgcccgcaatcagcccattgtcatgctgtgactcggccccagctagagtcaacggtcgtgcggctctcggcgtagcttgagtgacgtaggcgttcagatcatagtcttgatccgagccatcatccacgttcaatggcggtggtgcgagggattcagcggtcaacgacagtccctttgtgtttttaggtcgtttcgatttgatgggtgcgatgaagccgtccgacatgatcaaggtacgggactagctccgcaggcgccggcaaagctataacaaggatatacgggcgagaggatatctctaatcgagaaggatgggccggacgaatgtagcgagcaggttatccgtttgctgaatcgcctaatcaccagctatagtgcgtagaataatcatcactttgttctctcttgatgtcatgtcaacacgcaacacgctcaaccccggtcatggcgctaccgatcgccggaatcaaatcatatacaaggtcggaaccattttctaaatatcccggaatgaaccaacaatttgggtgttcgtttgccgtcattcctcgtgtactcccgaaacgctcgaccttgtcggcaagctacagactacaacatgataccaatcttgcctaaccccccagaaacagccactcccatagccaatcctagcacgatcaggcataaccctagtaccaactcgtccttgcccatgccagacttgaccgacttcagtctctccttgcggagcagtttcatgaccgtcttgccgtcgtatgtgtcgctatcacgaatgacaatgttgtccagggcttcgtcgctgggtaccatcccgatccgtctggcccacacggcagagaccttttctgtggcctcgcttgatttcgccttgccgtcctcctctgccttcttgacttcttcggccgtcccgtctggcttgagccggagttcaatatcgttgccaccgatcttgacgatttcgaccttgtcccccgaatgaacatcattcttaggtgccagagtcttcaacccggcgagatggtctcgactacgcgagtttacgtggttccagtaattcctcagaccgttctgatcgaccgagtctcccgacggactggtagccagcaaccgcgagaacgcgagctcgtcatcgctgttttctccatcggtaatgataccaggggtcgacgctgctgaatccaagtcgatcttgacccgtttcttagcccagtcattgagaacaggacgttctttgacgtaatcgaagaagggtatcgagtatccgcaggactgtagcgagcctggaaggatcaggaatgctcaaggtcgagatagatatcaggaggcgactgaccgtgccgactttatggactacgccgttcacaagtgtttagatcagtcacttctctagcatcccgcgccgtagtacagtgcgctgctcaccatcaagctcgatgatggccctgcaacccggtcggattctaggatcacccgttggaagcatctaatcgtcatgtccagactctaatcagcctcggcccccatcctcgatgtacagttgcgcggacttgccttttcaaattccggtgtcgcccgctcaatcactttgcccgtgccgaacaaccttacgatccggggtccaccgtcgagagcgatgaacatgatggtgagcctgccgttccccggttgacgaaggtgggcgatggtctccacccctttcgaaaacgaacccggaatgtcatttagtcgctccccatccaacatcaccagagcagtcacataccgctacctgtcagatcttggtctacgaatatccgaacctcagcaacaggactggctgtacccctacacacgcccctaaagaccagacttacaccggacgcagttctcgctgacgacctcgaacccttccatatccttcgggctaacgttggcatacccccaactctcattcttcttccaacccgattgctcgccctctggaatacctgccgaggagggcgagggaggaagcgccgaggtggctacgaaaaagatgtgctgtttggtgatccattcgcataggttggaagggatctggtcgaacgtcctgctcgttcgttagaaaagtgggcagtgtagtctcagagaatgatgtttccatcgactgggtcgatatcgaagtagacttacaggcccatcttgtggatttgtcagcagacgcgcaagagttgaggtcttgaggcgatgcgccaggcggatatcgaggcctgtccgaaatggacacgttcgtaagctgtcatgtatgtctatttataaaaaccgattatcaacggccaaccctgataagcacttgctaacaatcgctgtcgagtttatttgttgatggcaccggccctagacacagattgtacaattcccggtattgcgttattgtccgagggtgtctccttgaactaatgattcctaggggtcttatgtttgacagaagataatgcaattgtgtgtgtcccgatatatttgattaaggcgatcagccgaagctagctacgtgcctgttggtggatgtgctggttatgatcctaggtattgaacgccatcgagctgcaagctataatttggaaccttttggcttttggctttgctgaggacggtatgcatatgactcgtgtctgatatttcttccgggggtgaggcggcatcggtgttcagcatgttcgggcaaatccgacaagatcgacgccgaaagaaacgaacggtggtgactggcgaagcgagatgattggcacatatccgcggtgcgaaacccggatctgcgctaagacactattcgttctatctgatgcgtcatttgcacgtgtttcgtcataatctctgatcgaagggctgacaggaatagaagagcagcaccactgagacgggtcggcgggcgggtaggcagatgggtctagagcacagagcacggtcagcgtagcgacacccctcaccaagacgtatagatagcgagggcaaagcaatcgatcacacaacattcgcctcaggcccccctttttctctcacaggtaacaacctctaagaacgaataactctccactttcatcccaacactcacaccaataatcacaatgtctacccctcaagtctcccctaccaccggcatgggccaaggaaccggtgctgccggaaaccaagactttatggacaaggtgagctaaatctcggagacaaaatccgacagactactttagtcgaagcctgacccgtcttactgatattctcaccatcgaaccgatgttatagggtgtcgattacggtctcaagcaggccggacacggccagagcgctagtaccacgtaagtccccggtcttcgtcttcacctaccgtcagcgttcattcaaactcatccttcgtcctttatgcccttctttctgcatcctcgtatcctgggaaccttagcgagaaaatttcggacggaattcgaactgggttcaagaagatgaccggaaagggtgagtggaccgtcatcatttaccaggaaatcccgtcctatctgccatgtaaagtagcaccgtttgctcgaatttcgctgactcgagttgcatttcatctttctcttgtcgatccgtagacgttcccatcaaggacaagcagtaaactttcgctgccggaccgcgccttccccgactcgatagtcaactggaagggtacactatgtttcgatctccctccgtatagcctgtagccccagagtgtgaacgtaatcaaaccaaagatcagattgagataccttgagatccctccatgtcttcgatcggcgtttcagggaaagatcgatgacggaagcaaagacgtgtaattgggtggcggaagcagatattcacgagagtcgggccggcgttggaccgaggctgatgggtagcatcatgcatcatgcttcctgaggataatggtcgatgtggttgagttgatgatctggttgatgttgcaggagtttcgtcactgatatccaacacctactgtactgatcccagctgttcacgatgctctcagccaagccgcacaccgctcggtccatggtccgacaggccgttctccctctcacacacgtacgacctcgaccggcgttaccttccatctccattgctctctcccccgtctcctctcgtcatcgagcgtacgacctcgccgcaatccgtaactgcaggagcttttcctcgactccagcatgtgctgtcggcggtgcggaaaaggttctgggtgtagcggcggctttaaaagcgcaggaagatgccgggttcgagatcagacccgagatctttgacgagtttagtcttcagggccgcgttggtgtggtcagtctcaggttgatatctgatatcagtgatcaacctggatctgaacggcattcctttttttcctgagtaggtatctggaggaaacgggggtctaggtttggagatggccgtcgcgttgtgcgaagccggggccaagatccacgcgctggacctcccctcgaatccctcttccgactttgccgcctgcgtagcctatgtcgacaagctcaagaacggatcttccctgacttaccaccccacagacgtgaccgaccaaagccgtatctcttccctcatcgtggataagatcgccaaggagaacggaaggctagacctctgtgtggctgctgcgggcatcctcggaccggcagagggcgagagttgcatgacttacagcaagaaggattgggagcgggtcatgagagtcaatttggacggagttttctacacctctcaggctgccgctaaggcgatggtggatacggggtgcaaggcgggtagtatcgtcatgatcgctagcatgagcggaagtattaccaacaaggtcggtagggcttctggcacctttacaaggtctggtcttacatgctaaccgtcagtacaaaccataggaccaaccttgggtggcctacaacacgtctaaatcgggagtcttgcaaatggctcgaagcatggcttgcgagttgggcaaggagaacattcgcgtcaataccatctcgcccggcaagtatcgccggttctctccctgtgcactctgattcgatgttgatctgtacaatcgccaccgacctgacagggcacatctatacaaaggcgagtcggctgcgcatacgaaaaggctatcgccgtactgatcaagctcgatgacccgtacagatgaccgcagcgttgctagacgttcatcccgagactggagatttgtggtccacctcgaacccccttggcagactcggccaggtgagtcccaacgcaacgacggctttcatcgagagggctgatgaaggtgatcgatatcaaaaggttcacgaattgcgaggggttgtgtgagtccgccacgaatcatatttctgtaaacagccgctaaatcttagatttggtgtgcagcacctggctggcatcggacgcctcgagtttctgtaccggaagtgacagtgagcgactttcagccatcccgcatccatcgcttagactaagaaatgtctgggtcatcacagtcctcgtctccggcggtcatcattcttggtgattgatcacagagcattatcacgtccattgtcttctagtaaaattagtcttgtaacaacagagatcgtgaaagatcgttgtagtccttcctatcaatcccagtttggcccgactgccaccggcgtagttcaactggaagcagattcggggggtaatgacggcattttccggcccaagttcgctttggaaaggcagtcgagccggaggtaaggattcctattttgtcgcacgacgaatcgacgctaggccggagtggtaatataatattataacgatgtggttctctcatcaaggtatgtattcgcaaaattgcaggatatcgcgtggtctcatacgggtctggatttcgaccagcgtcgaccatcacttgactgtggatactgccggcatcatgggcatcatgatgacctttttcttcgccaatgtcacctcttgcacgacctctttcttgacaaccgtccgcttgaccggtttgccgttcccctttgctccggtccaagggttcatcgtccccttcagcaactcccacatcttcttgactccggttcccacattagcctccttcaacccattgctggtcaaccagaccacctcggacgcagtcttacccttgggaatgcggatcgtcgggaggggcccgctgatcgagacctcccataagcgataggtcatgcggatgtgggaaaacacgtgaacgtattcgccatgaactcggggcgcttgcatgtcgtctagagcaccctgttcgaggtacgtcttggcgtgccggacgacagtctcgacggcctgctcgtcgtccacatcttcatccagggcgatacagggcggttcatagagtccagccagcaaaccttttgcgagtcgatacatcggtgatcagcttcgacatgacaagcccgacgttcctgtgacccgacccaccttcttctggtcgtttgacgaaaagccaccggggctcgtcgtcctcatcgtcctgtggctcccatttcacgaccaagactgccgacgactcttccctctgcgcctttgcgacctttttcatggggaacaccgtgacctccataggacctgtagacgctggcaatggcgagcagatcgcacattcgtcctcgtcggcagccggcaagtctggcttttgcgctagcttggcctgttttccgaccatcaagagtcagtgcagtgcatatgcggagcgtatcaaccggcctgacccacctcggtatacgcttgacaaccggcgcggatcggacaagccgcacaatctggagcggcgggtttacaaacctgactaccgagctccatcagtgcctagatggtaccaacgacacgatgagctgataccgagacacctctcgttgttacttgccagcctcacctgatttagatcccctgcgaggcctggcggatcgtcttcgaggtcatcgaccaagtctttcgcgctcgtccacagcgtcttgatcagcgccgggctcgtcggtggtgcatgaagcgccaacaatcgacacagcagtcgatggacattcccgtcgacctggtcaagttcacgagttgagggggaagaagccttcacttagtacacctttcgaactccaactcgaagtggagatgttcaaagacgggacacactcacgatcggtgttttcacgccatacgccatcgaagtgatcgcccctgcggtatacctaccgataccctcgacgtccttttccaagacggccggatcgtgtggcaacctgcctgttcccaccggtcatcgagattcagttcgggcttgttttgctggtggaccccgagctcgtctcgactgaccgttgtatctttcaggatccctcacgatcctctgcgcacccaagagtagattcttggcgcgtcggtaataccccagtcctcgccagatcgagtttacttcctgagttcaagtcgacccgaccagacgtcgtgtcagcgacgttgtgctcgaattcgaatcgttcgggtatggggacgacctgcctcgatatccgctttggcgaggtcctgtatcgtcggccacctgattatcaggccgaatcaacccctgatcaaagaccgcttcccacatcgcccgcgggggtcgagtgagtgacctacttttcgagccagcgtttccaataggggatgacggtcgtgacctgccgagccgcgttaggatcgtcttttctccctcagcaagatgcgctttggaagggacgtatgtgtgagaagacagactcacctgcgtttgttgcagcatgacttcgctgactagtgatcgagacggtcgaagtccgagcgagggcgcgagaaaggggtatagatcagctcgtgtcgtcggtattccgtactcgatcgacgggtcttttaaagacgcaagaggcgggagatcggcgaatcttgccacgggaatttgggtgcacggaaagtgagatggagacatttctctcggaaccccgatcggaaacattcggacagggggttttgacgacttcctcctgggcttgttccagggcttcatctcgaacatcctcgatccaaccattcgtactcactccagatctgatcatccgcaccgcaccgcaccgcaccgcatttaatcagctttcatccacaccctcttgcctctcctccaagtcagagtggccgttcgggaggagagggggcaaactcacctcgtacgctctctgacccttgacctccatgctaacgagatcatcgtacctctttctccagggcatccgtctcttctccctgacctgttcgaaccacgccaagaggtccgggagaaaaggcgcgaggtggtcggtccgatgatattccctcgtatgaagccgggaagacggaagaggtttctgtcgtttactagcagaaggttcggggtccttttcgtcgtcatctttgtcgtcgtcgtcgatacgggctcgtcgtgctttgcgtttcgcaggcacgatcacggccttggccgacctcgtccgggtgacggtgctgctcttcttcttgagggatgcgttcgaggtggagcttgcgattatttggaaatcagagtctgaatccgagtctatcacggtggcaggcggtggttcatggtaagacgacgacgaggtcggtgacgacgacggcgccgatgatgaggaagatgatgacggtgttggtggagcgggaaggctcgaggatggcgcggtaagtggagatgtggcgttggccattctatccacggtaatagtagttcggtgcatctgttgatatcaggagtggccgtggctagctggcaagtcgatgaggttgtggctatcaacccgatagatagatagatagcttgatgcaacttgcaaccttcttgtctgtctgaatctgaaatcgcgtcggaatcgcgtaaatcgcgtcgcgtcaagaggcaagacaagggagagggggggtcatttgaagaggaatgatgatgacgtaatcacaagtgatcatgatgaacactgcgtaatctcttcaatccgcggtgcatcactctactcacctcacctatcaactgcagtctcttgatcgaacgctgcgtcagcatcagcatcgagcgaagtagagtagaggagacaactaccacccactaactactgatggacccgttccaatcttcaccctggaccacccttcgacaaattcccaaacccctgaatcatacgttcagatcgactagcgtctacttcatctaccccacaaccatgtccgcacccgcccccgacccacccaacccggactcgtcttcgtcaaaccaagccaacaaatcgcaagacgaaactttgtccacatcacaagcacctaccgatgacgacgtccagatgaaggatgagccagaaaagaactcggaggaagaagaggaaaaggagcaggtgaaagaaccagaagacaagtatgaggatatcccggatcatgtgatgagcgtgagtcaccaggagctagctagggatagggaggaagagagaaagcgggtatactaacaatcgtctgattatcgtcctcgtcctcgttgtcgccgttcctcctgcctaccgattgagcaatatcagcaagatccagatggcatccgattacaaacccgaatgatcgataacgaggtcaaggtgagccctcagccagccagttcccatcagagatgtctatcgactctccaaggaggtctagctctgcaaatcgcttttcagtggactgaccatgtcattctcgtttccccgctatcgacccatcgatctcgccatcgtccatccgttcctcctcatgatccggacgacaccacacaccctcgacagatgatgcgtcaagagaacctccggctcttgcacgagcaaaaccagatgaaggaaaagatcgccgagaatgcgcaaaagatcaaacagaacaaggtcttgccgtacttggtcggcaacgtcgttgaggtgagtccagggggttcatcggatggacgattcgctggggccgacgaaggcgatggcgatggtgatggcgatccgctgacacgcaacccctcttgcctcgacgctgctgatagatcctcgacgtccccgacgaatccacctcggaacaaggggccgcgcaaaacacttcgacctcgtccgctcccaattcgaaatgcgccgtcatcaagacgtcgtccaggcagaccgtcttcctgcccatgatcgggctcgtccctgccgataaactccgaccgagcgatttgatcggggtgaacaaggatagttatttggtcctcgatacgctgcctgctggtgagtctccatgccaggtcccacgtcagacctacgacgggcggacgggtgaggagcaacgtgctgatggatcgatcggatgtcgcggggataaacagaatacgactcgcgagtcaaggcgatggaggtggacgaaaagccgacggatacgtatacggatatcggaggactggacaagcagatcgaagagctcgtcgaagccatgtgagtcatttgtctcgtgatagaaacgccccgaatctcgtctcacttgaaactcctgcttgctctcgccaaccttgctccagcgtgcttcccatgcaacaatcggaaaagttcaaaaaactcgggattaggccgcccaagggttgtctcatgtacggacccccggggacgggaaagacgttgttggcgagggcatgtgcggcgcagacgaacgcttgttacttgaaactggctggtccttcgttggtccaggtgagtcatcatttggtccacgccttgacgaacattcaccgctgacggacctcgaattcggtagatgtttatcggagacggagccaaactcatccgggacgcattcgagctcgccaaggaaaaggccccggccatcatctttatcgacgagttggacgccatcggaaccaagaggttcgattcggacaagagcggagatcgagaggtgcagaggaccatgttggaattgctcaatcagttggatgggttcagtagtgatgagcggatcaaggtgagtcggcgggccctgtcctccttctcggccgagtggcagagggttggctagcagtgcggaaaactgatcacatcccttctcgctcctccctcctcggaccttgcccgcttccttacggcacaggtcatcgcggccacgaaccgaatcgatattctcgacccggccctcctccgatcaggtcgactggatcgaaagatcgaattccccctgcccaacgaagaggctcgtgcgaggattatgcagattcacgcgagaaagatgaccgtcagcccgaaagtcaactttgaagaactggcccgatcaacagacgagtttaacgggtgagtcacacggatatgcgccaaagcggttcaggtcggacggccgacgacagagatgccggatgactaatatatcgtcggtcgatcactcccgcagagcgcaattgaaggcggtttgcgtagaggcgggcatgatcgcattacgggagggatcgaaagaactctcgcacgagcatttccacgggtacgtcacgacgatccgatcgcgtttgtcatgaccacaggctctcactccggatggctgacctcacgctcatggtcgatgccgctcgtacagaggcatcctggaagtggcgtccaagaaaaagtcggatcactttgtaagtcgccccccggtctcttgtcgacatcgccgctgcacatcctgaccccgctccgtatttctcagtactttgcataattcacgcctcgccatccccgttcgctccccggaactcgatcctggtccatcggaccgtcacccggacggaacgcaaatctctcatgtaacgaaacgaccggccccgtctccccttgtcgacgggccaagacgtgctaggaccctcattgtatacagttctcgatgctcgaattatcccatgatgacctttaatcctcgtcgcaagctggccggacgcggtgatgcgtctgatccgactcgggtggtctgtcggtcacgcagctcggcgagcttgatggatggatgtttcaccgccgggaccaacaaagggtgcctaaggtatacatgtcaacggtgagctcgaaagatgatactgggcctaaagggcgcaccgggaatacgtagtcacatgggtttcgctaagcattcgacttggcttgcaatgcgatcatcacaatgtcgagcaggtgcaaaccaaaccctgctcctacagccagctgactgacgcagcgacatcgatgaaccatgattatgctaataaatgtttcatgcaccgacaccgccttctctttcagatacatgtcgatcggatgtggatggtttcgttaatcgaggcggcattatacagacacacgtcttatcctcgcgtccagttcgtaagctagatccgaccgcccaaccaggctggccgatccaagattgagtgggatatcgattcggttccttgtctaggttcgagcatgactgagtagacctatggtgtcagctacaggtggttcatattgcatgcgatgtgtttccatccactcacgactcttccggtatagcgcatcaatggaagcactgcccttttctgctagcacgccggtgagccaattttgcacatcttgcaggatggcgagattgaagggttgctggtatcgggcaaactcggtgacgatcttggcaagcttgacttgccgatcaaagttgatgagtttgatattcggatccatgggggatggtcgggtgctcggatttccttcggccgtaaacgtgatactgttgaggtcgatcggcatacgatcagctgggcagtggcgattacaacacaaagtgcaggccatggcgcttactcgcttagcacctggcccaggaatggtagcacgggaccctcggccattctaagccgtgtccggtagacttggaaattctgcgagcgagagctgtgaacaccgtgactcgagatcaccagtgcggctccgtactgactttggtatgctcgaccagactgcgcaggtcgtccatgatgtttctatatttggcaggtaggccctagagattgttcgcgtaagcaaacaagcatttattctctcccggacagctcggccgactcacgtcccaagttctcttcaaccgaacaatggtgctgctgttgagggctcctagaatcgcaaaaagtgtcgaaaagttttggagatccagacatcgctatggcaaaaaccgaaggtcaatcggaggctctcaggttgcccatctttcatcttgctcacatttgacagcttgatgaaatacttcagcaaggccgtccggcgctttagatcagtctcctcgagtatacgatccatgacccatccaaagattctggtcgacaaggtgctcatcgtcttgaggctatctgcccttggtttgcccagacgaatgagctcttgcggatcgatggcgcagaacagcttggactctagcagagtgagttgtcgagccaattccaaggcgtgaaagtcggtcacgtggatgtgcgaagatccgctcttgagcgagctgaacaattgcttgttcattatgggtgttggaggtagtgccgagcttgaagacgacatgctgaacgaaggacgatgatgatacggagtacctatgatcgaggccgatgatcccgaccgtagttggcgaactcgcgcgaccggcgaggatccagggaggtcggctcgagagtgtttgtcgagcaggtctagtaatcgagggtactccaccgggaaagctttggcgatacggtcctctaggaacaaacgcatcggttctgcaatacagttatcggccgctgggtcccaataggtcgacaaccagctcttgactaggccgagcagctgtcgcctgatcggtgccaccttcatctcgttccaaatccgcaccgtctctggttggagaggcatcctcactgggggcgtcacgtcgaagcgcgcctcgatcgcctcgagcaacgtcttgggatcggtaaacaggcgaaatgttaggaagaaagtctcccatagtgtgggatcgactgcgccgtcatggggcgtcagcttttccaccaagactggcaaggtggcgcctatgagcgcgccatctgggttgtaggcgatgtccttggggttataatcgtgcgataccaagaacatgcgcatgtcagctggagtgacttccttgggagcgggctcttttttctgaggcgtgagcgcatcctcaaagcgagcgtcacgtgagatgacctggtgatcttgtgtgggaaacgatggcatgggaggttgctgctggttttgaccagaccaccatcgcggaggccttggagtcgcttgtacggacccttgctctgagcctatactttccggaatactgggtctgcgggtaaacgtctcctcgcccggcctgggcgtgttcaagaaggataggtcgctcggagtcgcgccacccaggtctaccgatttcgagggcggtcgaggcgatctctcgtggcccagtcgtggggtatgaccgggcgatgtaaagcttgatgccctgccccttcttcggggacctgaaggtgtagccaaagggttgctgcttccaccaccaaactctgctggagtctgaagcagaggtgacgagtggacggacgccaaagacggtctctgaggaacgttgtcatgaatatgagctcggctaaccgatcagaaatccctatcggacttaccactggtcgattgcgtgcggcttgctctgcaggtgtcatcatgatctcctgctcgtcgtcttgaggcacgcggtacgtccggtctagaggcgccgaccttggtccagaaaagtcctgcacatatgcctcgagaaggctactatgacccgccccactttccgatccggaagattcttcccggctctgacgagaagctgaagaccgcgaactggcatgggacgatctctcgtcagaatcccttcgacaccgttcgccttcaagctcgaactcggcggatctgtccctgatttccattcgactttggttcgcaccaccggaatcgatcctgatgcctagtccgagagtttccatagcttctctcctattcccgcaaatcttgaccagcctgacgcattcgcgcgccggtctcatgatgatcgaagcggagctgagcagcctctccttgttcatctcgtcgtcttctccgggaccctctttgtagggcgtactcgctacccgctcagccgcctcgacgagtgccgacgtcgtctcgtacatttgccgtttggcttgatccagcgcgacgacttctctaccatggttcctcgccgtcggctggtggttgacgacgagctcgacaatggccagcaggtctcggatcttatcgatcgtctcgcgtgagaggtccacgagtagagcgtgagaggatggatgggaagcgaccgtgtggcattgcacatgaccgatcaaggccgccgtgacggaaaggagcgaatcgaacgtcatcccgatcccgacgataatgtcaactgtctccaatgccggttgtctgacctcgttcgaggcgacccgacgatgaacggtgggctggtagtcgttggacgatcccatcgaagagaccgagctgatcgacccggcatcgggtccgagtctacttcgagtcctcttggaatcggatcctgacccggcgctgacctcttcgagaccgacttccatacgggacgagactggcgaagcggtctgttggtactgatacctaagatcccgaccttgatccgtcgagcccgatcgaagtcccctcgtggagatcttgagatcactcatgctcttggcttgcaaattgacgcgtctctccttgtcgatagagctcgtcatgcttagagacgctccggacgctcccaaactctgtctcgtcctctcgatcgggatcgtctcgcctggggacgagttccctctcgcgtgttgctgctgtccaccctgtaccgccagattacccgacgaggttctgtcccctaccggttcgccgcgcgatccctcgacatctttcctctcgggcaggtcgatcccgcatctgaccaaggccttgaggaacaccctgacgttctccagcgtctcctcgctcgatttcaacatgccctcaagctcggcctctttaaactcttccatcccgtcgtctccgtgtgtctgttccgctccgagtcggggcgtgtaaggttgactggcgctcctggcgagagcgacgagttcggcgaggttggccaggatcgtctttctgatcttggccaggacggggaaccctgccaagagtttcgattcgcgtgagagacagtctgtggcgaggagcaacgaacggatggccgagatggcacaggcggtcgagggttgcaagtgtgagatctttctcgatccgacggccgaacggatgagtcccatggcctgattgatgggttccaaggtgattgtgatctcggcctcggtcttccaatccacggcgcccaggttcttcttgcccgaatacgacgaggacgaatggtgatgctgcggtcgaatctgctgggacgagtaaccttgcgaccgatgatgtcggtggtgttgcgggttgacgatcggttccgaatgcgtgacggcgtgttgattcggacgaggcgcttcacgccaatgtgccatgtgattccctgtgggtcgttttgaggtggatgtcgaggtcgagggttgaccgctgttccggcgactctcggagagggacgagctcgatgtcgaagtgcccgatcggtaagatctcatgctcatctcggaagctcgtcgaggatcccggagatgctatgtagacgaaatacgacgataatcagccccggtcctagcccctacccatacgccgcatgatgcgtcctcaaaaggctctcgagactcaccctcgaatccggtccttcctcctcgacaaagttgctcgggaaccaccctctcccgtcccccgtcttgccatactgctctccgtacgtcgcgtccgcctctctcccctcgggatcgttgaccacctctccatcccaccatccgctctcgtccctattccagaccctgatccgacatccgacctggaacgagaggtagatgtgcgtcctgctcgagggcggggccgtgtaatcgtgcagtgcgatgacaaagtcgtccggtggcgcttcaaagagcgatggcaagagatggctaggtccggattgagacgagttggctgagaatgattgcatggtagcgcagagtcaaggccgtaggtaattttgagaggcgtggatgggtggtgggtggacggggtgcgggtctctgtcgtcgcgattctgggtatgggtctggcccggtcgttatctcacagcctcgttactcgccgcatgtcgttgttcatcagccttggtgttatgcgaacgttttcagagtgtggtttggtatggactggaagtgtcttggaagtgagtgccttttcccatcaacctgcaacctgcaacctgtagctgtgaacggtcatggtcatggtcagtcaccacctcgcctgcctggttgcctggttgcctgggttgaaatgatttgtttacgtttcgcgccctcacacacagtgacgcgcataatagcatggggggtccatagcacatccctctaattcaattcaatactctctgtctctacacgcacgtcactttcatatacatcaagcactcttgggaatcaactcctccttttcaaggtagtcgacgatgatcctcacagcctgggcgacgtcgacctcgtccgttcggatatggatctcggggctcgaaggcgcttcgtaaggtgcagagattccggtaaactctgtagtgtagcggtgttcaaagcagtgaaaatcgtcattcgacgtatgacggacgggcggcgtatcagcttgccgtctggggagcgatgacgaccatcgatcgatcgccgaggcgggagcgatgacgactcacccttgatctcgccagccctggccttttggtaaagacccttaggatccctcttctccacgacgctcaggggggcgtccacgaacacctcgatgaacctgatcgaaggcttgtgatcctcgtgcaactttctcgccaactgtcgatcagagacgtaagggctgatgaacgccgtgatggtcaaggtggcagacgagctgaagaggagggagacttcgccgatccgacggatgttctcgatccggtcggtaggtccgaacccgaggtcctgatcattattagagcgtggggcgaatgccattagcgacgtcttccccatggatctattcgacgatgcatgaaactcgccttgttcaacccgaacctgacattgtctccatccaacctgaaagcgtgcaacttgcgctgcaagaggtgttgctccagagcagtggcgatggtagactaacccggaaaaaaaaaacaagaaccgatccacacgtagcaggatcagcttccatatccccgtctccctcgaccgcgacccgacgtgtgggcaaagtgcgtccgggactcacctttccactggcactgagaccggtcaaccagatggtagctccctgttgtcccaacaactcggtacgctcttggtgagagacagagcctgcatgggtaagcgggaggacgggtcagtcgagatggctcatcagtgacagcgccgatggggagagactgggtaaggtaaggcgggaaaagctcgactaaccctcgtggaaagtgatgttggtagccattctccagttttgtattgtttcgtggtttcgtaagatgcaagactcgggtgtattgaatggtgccaaaaggacagcggttgttcacgaaatcttgcagggcatacccctacgattatacgattatccttttgacctgtcggagcagtttccgtggtcgtctctggaaggtcaccggaagcagattaccggggaaaaagtctcaccggaagcgaattgcatcatccatcagccaaagaatccgtcgtggcccagcgtattcatcacgaattcccaaatctctcgctctcgcttaggcggcgccaaaaggtggaaaactgaagaggcgtttcatacaggaccgaccccagctttcgctcagaatcggacaggcgggccagcagtataggtcggagtgcgacggtcgagtcaggcaagacagcatgcgacaatcttcatcgaatcttctccggtcatcgtagaaggatgtcaaaaaatttggcaatggtattgtgcgcgtcgtaccccataaactcgcttcgcctgaccttcgtagtatcactattcgccgatcctcacaaaccgtccacactactgatgcacttcactgcttggcgtttgcgccatcgttcgtcaggtcactgtcgaccacgaaagtccttgtcttctcgatgacaccaaagtccggaattgtcatcggcttgatcatcctcggaatacggctcggcgcgtggtttcgggcggaattacatttccggcagcacgttggatgggtcggcgtttcgaacaccctcaagttagggacgatagcaaacgatgggtatataaggatgtcgctcggtatgtccatcccggcatccaacaggtccatttcgtctttcacccctgaccatcgccagtcacattcgcattcccgctcatcaatcgactcagacgatacacagtaaacaaccaccccgctgaatcatgacaccttccgaggtcttcgacatcctcatcatcggctctgggcctgccggtctctccgccgctcttgctgccagccgccaattccgtaccacgctggtcctctcctcccctgctcatccttaccggaacaccgccgcgcatcacatgcacaacgttctcggcttcgatcacgtccctccggcattgttcaggggacacgccgtgatgcagctcaaggatcgatactcgccctttatcgatttcgtggaagacgccaatatctctagtgtcaaaaaggccgaggtcgacaacaaaggagggatggacttgtttgtcgcggcagacgcgcaggggcggagttggaagggaaggaaagtcatccttgccaccgggtcgagagacatcttccccgatatccagggatacgccggggtctggggtaacggcatgcaagtcgatacagagagccttcttgttttaccatggagcatctcgctgacagttgcactgatcgtaacagtttccactgcccgttctgtcacggttacgagcagaggggcggagccagcgcgggattcctctacttgaaccgggaccccaagatgatcggtccgttcaccggcgtcatggcgttcgtcctccgtttcccaaaagcgtccgagtccaaatccggcaacaagtacaactttaccatctttactcacggagcgcccgatacgttcctcgacgagttgaaagccaatcccaacatccagttgatgctcaagaagggagtccgaatcgataatcgccagattgtcagtttcgagatgatcgattctcctcagggaaagacgactcccgatgacgagggtcaggacctcgagatcacctttgacgacgggaacactgtatcgaccaagtttttactgcaccacccaaagaccgagctctccccgctcggagccacggtcgcgagcgaattcggcatcgagttgaacgcgatgggcgacattcctcccgcgtccccaatgcaagacacccaggttcccggactttacatcgcgggagacatgtccaccgcgatgaaggccgttccgacagcgctgtatcaagggacgctggcgggtgtgacggctagtcgtgctctggcgatggaggacttgcacgacaatgacgaggtcgatgcagatgatgcgaaggattcggctacggagacgttgttaggtttggggtccagtgcaaacatcgctcgagtcaaggagttgtgaggacgtcaatttgtgattgaaccgtgctgtaatacatgaacatgcagggaaaacaagagtgcgcccttgacgcacagaccgcgctcggtcaatccagcggtggctttgaactctgccgactgattaccacggacatgtagttttgtttatcatgtccgtgatgcgcgatctcgttagtcgactcgcggcgatgaccgaacccggtcaaagcaagaagcaagaagagcgccagattggtagacacaaagattctggagtataggtctgaccaggactacgcaaccatgcgtgaggtaaagctaagcaaaaggcagcttccgctcgtcttgatacttctaggggtgttctgatctatgagatgtcaacatagctcgaaggtgatcatcaacttcgggaacggcatcaagggatctacctagaaactcgtcgtatctacggctcaggagaccatgccttccccatctactagagataaagtgaagaagcgcaggtacaaaagttcccagtcacccgagccggaacatcctcgattctacgtcagcaaggcttgcgaagcgtgagtatcttcggagccaccgagcggcgaggatgatcgatgagcctttatctggtctaggtgtcgaacacgtaaggccaaatgttcaggtgagcgacgatgtgtagaatcatagaaaccactgaacctgacatgacggtgcgatcgttactccgtggaaaggggggtctccggcttgcagcaactgcaccaaacatggccgagaatgtgtctacctgatccagaacgatggccgtaagctgtaagctattcctcagactgccatgtatcgcagatgctccgcactgaaatgacttgtgatgtgatcatcttccaccaggaggggcaaggcaccaccaaatcaggttgaaacgctgcgagcggagatcaggcggttggagcaggctttagaagcctatcaaggggaaacgaccggcgggcctagcgggtcattttcggaaatggagttgggccattcgtctgatgtgccgcctgatctccaaactgctttaacctattcgaaagcaattgcagtaccgatacgagagagtatggatgatcatactatcgaggcgacgaacagcagtgagcctcaggacacgcgtgccgccccgcctatttcactcgatgggcctctaccggttgagccgttttccactggaggaactttcctctgccctaatggtgctctccacttgcacgcacaagcctccctctaccagggcatgcacattacccccgagcaaatggctgaaaccggccacaaacacgctatgacccatcgtaaaggcccgatctgcaaaccatggcatgccccgtacatcccgctcgccatgatggggaaagaccaccagactatcctcgagctaggcttccaagccgtttcctttgcactctcttctggttggaaaaggcggttcactgcgcacttgttcaaggaccccgaaaatcgcacatcgatttattcgccgttcctacacctcgtcatactggcttatggctggcgatattgtcaagattacccgatcatcgctcgctacactcacctaggacatacgtatgcggaaagagggtacatgttcgccgaaagcgcaaggaggatgacagaggcggaatatgcgtcaccgaagatctgtacggtcgttgggctcgacctgctagctatgtttctggcaggcacaggtaaagggtaggccggcaggaaaacccgttcttagtgctcagactcggggttgactgctgggccatctgtagcatcttttgtggaccgttacatagtcagttaggagacgactgagggaattctgatatttctgacgatatatgcgatgcaacgcataggtattgctacccactatacacaggaatgtgagttccgttgatgaccctacgactgctcgattgatgcctgaccccaacgctcacagtccgcctcaaccgcaaatgcgacgatcaactaatctccaccgtttccggcgaggagctagatgtcgcaggtcgagatgcctttacggtcaatcgaatcgtcagcaggtaggtttgcaggctaacttgtgacacactgtagccagctgacgaaccgacctcgatagctggtggacaagcaatttcggtcgaactgacctcgatctgatatcgtcggcggatcagagaccaccggtgatcgacctcgatgtcgatgacgagcctctgcgtcaggacggaatggttctgcaacattatttcgaattggcgacaaagtcgcatacgatctacgatgctttacatgtggtctcgttgcagccgacacatcggatagaggtagtcttgcgaatcagtgcggatatggatgcgtggtgcgttcggtgatcagtgctattatcaatgtggactgaactgacatgtcgattctttgtccactacctaggtataatgagttgccctcaagcttaaaagtggcttctggtcatcatatggtcagacctggcgtcaagtaggtgatacttgacttgagacgtcttcatcatggtactcataaattcccctcagccttctcgcactgctctgtctctatcaaacctatcgcatcctgatttaccggccattttgtgcttggcagccggggctgagcaatctcctgcctcaagcgatggaggaatgcaagactgccgcagacaacatcatgcaatatgtgaggacgatcaagggaacgaacgatgtgcggagggtgccgtacacgcttcaacagtaagttttcgctgcaaacactttgctgaaaaacaccgagcttgaacaactcttgcgctgggtgtccttgaatcacagcgctctttacgtggccgggacagctttactcctgcagtgctcgatgatcggacatcccgtatctcttgagacaagcgcgcaggcgaagtcggatctcgccgaggtcatcgacgtactcgatgaattgggcgaggtttggccttccgcttcgacatctgccgaggcgttgagaaatctgcgaggagtctgggcggcgtgatgaggatcgattgatcggtgcaggctcaggtcatacgtccagaagcgagtgacattcgtgaccctgacgatgaggctttcatgggctaacgagcgatgcggcttgagcggtagcgcgaagtttccccgcatcactcagaaccaacttttacgacaatgagcgggcgagagtgaagatgccagatctcctacgaagggactgtgtgacatggatgccgactcatgaactggcccaggtgacatcggcgtagtctcactgatcgaggcaaagccgacgaggtcgtcattgacacgcgaggcggggaccctagtagccaccgaattatccgcgctttctcacgcgtttttgaagcgaaactttgtcgtatcccagcctccctagcctccttccagctttccgtcagcgcagctagccagccagcacagtggggcctgggggccatatcgaagtaaagttgggtaaagtcaatcacttcagaatgatacctctctccctctccctccctctccctcacccctccccccctctcgcgtccatacgacaccagctttatagaccgagacttctgtcactagcgatagtgtagggtcgaagggatataaccccccccactttctctccaaaagaggaattcggaaccgcgtttcttccttttctcggacagtgaaacccgagggaaaactcgagaagcaagcttgaacgatctcgagatagccagataacccggtcgttaccatcgtcaaccaatcgtcgacgctggctcaggacctatctgtcagatctccgcagaacggacgaaaaggcatctcgtagcgctttccccgcgtcctcgctcgcttccgtcttcctcgtcaaaaagggaaaaggcgaccgatttcgattcccctcgacgtttgctcgattaacttcgagtcgagctactcattcccaccgcaagcttgggaaggagaaagaggaatctttccgggaaacgagacattttgtgtcaagaggaggagctcacagagactacagaaggagtagacggaagcaggacacggatcatcatcgatcgcgagttttgatctacggaaggatatcggacacttgatcaattcctgacaagtctcgccacatcgaccgtttttcgccctcgtgtctttcattatcaccaagaccctctctttcagtcttctctatcgaatcgtctccccttttggccatcaccccggaacccctttcaaccttttcccgaccgcttcaaaccaaaaggtccaccccgtcgtacttttgcctcgctctagtcgacgtcaagcaaccatcaaactttcctcattttccatccgacggacaccttaattggtcgtaccgccgacaacacctacttctacatcacctcccagcccaactacctccaagtgccttttgcgaaaacagctcttcactgagtctcgttcgagcagaatcgcccagttaccgcagtcttcgattaagaacccgctcggtacctgaacaatcaccattacacggagaaagcgatcgattcgagtctcatcaacggacccgacccaaccgatccgactgttctctgtttgaaaaaaagacgacgtagagtatccacggccaaaactagatccagacggaagactataaagtctttagtctccgcctcttcggatctcttttcggtctaccggtctttggaagtcgagaaaacatcacttggggtaatttgcctctcgtcccgttctctctctcttcctttggatcgccactcgcgtcctcttttctctttacgcatggcctacactcaaacttacgcatatcctggacgggaggacagggaaggaggatatgcggatctgagcgggaagaatacgtttgaaaaccaaggccatcaagcgatgtttggtagcgttcatcatcaacagcaaccttatcagcatcatctttaccaacaacaacaccagcagcaacagcaccaggttggatcgagggataggttctacgaccaacgccagtaccgggctcagcagcagcaggtgcctggatacccttcttacgcgccctacgtgtcggacgaagagagggtactcgcgctcctctcgtcgtcttcctcggacaacctcaggggactcgagtccaatctcggtggcatgatgtcgaatcctcagaagacccaatacgctgggaacgactcggtcgattggtacggtagcccttacgcctatcccgacgagcgttacctcgaccaggccagagaggtcgatctcgacgtttaccatcatcgtcaacaagacgggatgcgtcagggaggctctttcgacgctagcgagactgctgccgtggccgacgaaggctacaggagttgggccgacctcggtcacggccaaaaagcaagcgaggaagacgaggacgacttcccttcagcctacaaacccgctgcggcgttccaaccctttgccgaggaagaggtcgtcatggaggacgattacgagtacggcgaggacgagtatgacggtcagaaccagttgagcaggtctcagactttgcaggagggacacggctcgttctcctccggatgcgatttcgcttcagagcccgttgcccagcaacagcaacaagaggtgggtacacttgtaaggaccgaggtttcgtccatggacgttcctttacctttgtcgcgcgacttgagactgatacaggtggttcctttcacctcgtcatcgcccgatgtttccgatcacgctctcggattgcacaaatactcgaccttgttctcacaattgcctttgccatcgcatcgcttcgaccggactctctcaccacgtttgacgaccggctcgttcgacctggctctcgctcctgccaacccggtcgacacgctacagatggccgtctcgaaccctcaagccatgcctttccagcaacagtacgcgggagagtactacgggaatgaccaatacccgtataccaaggcaagccaccttcctcgtggaggcgttgctaatcccttcggagcggtcggttctgaaaccctgcgtttcgattccgtgtcccgacagtcccaggaacaggtttccatggagcaacaagcgtaccctctcgctcatgtcggtggaaagactggttacgaggctggcggatttgttcaggatgccggtgcccaattcgagcagcaggctatgcaattcgagcagcccgtcgtcgaagaggttgcgatcacgtcgggcgtcggtctcagcggatggttggctgaagctgtctggcaattgtgcatggtcccctttgaacccatcggcgacaagcatgttgctactgagtacgtgctcgacaaggcgacacggttcactgtcaactcggtcctgacttctctgtgtcccgattatagtgccacgtttgcgaacgagatggattttgctcactacagccctcaaagccgaaactggagtggattcagctctccggatgtcgtctcataccgcgaactgtacgacgcgtcttctgggtacgcttcgcccgtcatcggctcgccctcgagcaggtttgcgtcgaacccctttggattgcgttctaaaccttcccaggcgtttgtcgagtttgtccaccgcactctcagccagaccttgctgtcgcccaccgctgtcgtcctgtctctctggtacatcaaaaggttggcggtgcactcgggcggaggcgcggacgggatcatgctcaggcaaatgctccaccgatccgtttcggacatgaatggatgcggcggcgaagaggccgttcagaggatcctcaccttgggtttggcgtgtagcaacaagtggttggacgacaacacgtttaccaacaagtcttggtccgacgttacgctcctccctcttgccgagattaacagtctcgagctgtacgctctgggcccgctcaagtttgatctctcgatcagcgtcatggaatgggacgaatggctctacactgttaaccagggcttgactccgttcgtgacagacggtctcgccgtggcctcggccatcaacgcgatgcgtcaagccctagcctttggcaacaccaagttcgagaacgacattgtctctcgtcgtaactcggccgtcgacgccgccgccgtcgccgagtacgacactgtccaccctgtcgctctcagcaacaacagccccaacaactcgatgatcctgcctcccatcggctcggtcgtcgatgctcgacacctgcacggatccgctccgtacgggatggctgaatatggctcgtccgcgctcgactttggctctcagtcgtacggccgggtcaacaacgagcacccggaggttcggtaccctggcaagcacaacgccggatacggttacccttcgtcccgacgtcaacaccgacggggtagcgtcttgccacctgtcgcttcgacgcttcccccgccccagatggcttcgtccgtctacccttcctcctccatccgtggtcaggccagacgtgagaggatcccagccactgccagcaaccacaacaacgcgtcgtcttcggcgtcggggttgggctttgtcaaccagggagatggttcggtctacccttcgtatacggggcaccagtactacctttcccacctggcgagtagtcatcaaccgaggttcatgtctatcatggcctgagtcgtttagaacccatccacctcgacaaggccgtcagacacaacgactctcaaccacctttccatgattccgacctttttttttcactgcgcttcaaaaaggtgtcgtgtgtgcgttgctttctcctacaaaggttcgcacacatacacatacaccacacgtacgcgtacgtcatctctggaccgctcggcggatgtgagatgggcgtacagcgggaagagatagagagcgatcgagcctcgttccgtcatgggaaagcgaccttcgaggacctgctcgtcaggacgatccccggttcactttctcggacaaggacaactgctcgatccggtagatgtagatgatctgattttctaatccgactctggcccgtccttcacccctctgctttttttaaaccttttacggggatccttattcccggcccaccgttttttttttgtcgcttgtcagctctgtatgtttgtgtctgtagattggccatttgccattctgtttgatataaatatctgattcacacgttcaaggtggacgacgatgatagtggtggattgttgcgtttacatttattggttgattgatttgttgtgtttgttgttgttgtggcgtgttgtttgtttacaatccatcacatccatatccatcatcgcatcatcaatttggctgtcaaagttgaaacccgactctacatcagccagtttgaatcgattgcaatcgctcacattcagactgaatcgatcggtcactcagaacgtctccatgatctagtatcttaggactgcgagagtgtgtgtgacagaccacccaatctcgagggcagaatagcctcgatcgatccagcaactagaatcgggcgaattctgtctgcatgaccatcagcttttctcatcaaaacgtcgataacatcatgtcaagcggatcatcatcgacccaaaagacatcttcgataacaaggatgaacgactcgaaacctagacccgacctctctcgggtcgatatccctaggcaggaagaggtcgtaccacgatccgtcagtttcgaaaggcggagaaaggcgggattgatctcggatgagagcctacaaaaaggcaagtaacaactcgtccaccttctcgcgtccgggacgagagaactctaaatgaacgagaactcggatctgatgagaattcgacttcgctcttcttctcgtccatccatctagcactcggagcgaagagtattttatgcccaagccggatatctttcgataacgacccatccactcatacggcaaaaccagcgtcccgcccttcaacatcgtccatcaacgacgatattggtccgagcaaagaagggaccgatcaggacgatatctgtagtgtcgaacacaatactatggacctgaagaatagatcttttggtaagaccggcccgaatagggtgccatcaccttcattggcacggtcacctagtttaatacgatacaacacgagcccggacatccatcgacgagtgatggaattcgccggtagtcaggtatcccccccagctcaacctcaaatatatgggcactcgttccgggagaggatcctgtccagctcttcccctcccgatgtcgtcgcccaccctctggccggattccctggtgaaaagaccgacgaccgcaactccgtcccatctccctcgaattaccgtccgagccaaccattcccaccgagcgtacccccggggcaccttcgtacggataccgagatggactggttgtacgaccgtaacgccgagctcgagctcgaactcgacaaactcgcccatcaggtcaaggtccagaacatggtcgcacgtaacgagggacgtcgggcggccgccaagattgacgcattggaagcggccttgttggatatggaaaggcagaacgccaagttggtcgccgaaggaaagagggccaggatcaaggagaagcgagaggccggttcaggagggccgagattggggttgagaatggggtatgggcatgggcagcggtatgagagagggaatgctgctcctctggtcgaggacagtacgtccatcgggacatcgggacggtcggcgacaacaccacatcgctcgcccagccccgacgaaggatccagggcgaccttgttgcccagacgccgatcgatgggaggggacggtcggacactggcgaccgagctcgggctgagcgatggtcccgctagcttcgaatcagtcggaggtggtgggaattcctgtacgcccccggtcaacgacatccctctggtcgaggtcccgcaggaagaagaatcatctcaagagtcggcgcctttgtcctcgtcccaacttgctcccgatcatgcagtgtcgcccgatcgagcccccagtcacaccgcgtcagacgtatcaggtcttcctcttcgggcgagcacctacctcaccccctcgcaatcagaaggactgccatacggctcactgtatagccccaaatcgttccccacgagccgactcggggtgcggaaccgcagtcgtctgttccccccaagcaccgggtcgtcctcgcctaaattccaggtctgggcgtcccctggatctccttatcgttctccgggttcgacaatcgggatcgcttcccgctttttggggggtaggaagacgctggcgagcgagttggcaagttgggcgatggatatggacgaggatgagacgttggaggtagaggagaatgaagcggtcctgcacgaagcgcagggcggggaggaggattggcagacaacgaggttaggaaggtatagcctgctggagaagaagacactcatggccgttcccgagcaagagacagagcagtcaaacgacacgacaaacacaacgacaacgacgacgacgacggagactggagcggcctcgagtgggagctgggtagggcgaatcttccagcggatcaaacgattctaccagtcaacctggctggaaatccagttcatctgggtcgtcttgatctttttacgacgagtctggatcgaggggcggcaggggcttatcttgcgctccaagatcagggacaataagacggcctgagactctgcttgataaacgacatctttttcagtttgtaccgcgatcttgatactgtggcatcagtcacgacgagcactttgtacatataccctttcaagcatgttcggacgatgagcatctccataatcacgatcggcgcctcaatcgacgtcatacaaacaaccacgttgagcgttgtcgacccgcctcgagatcctctcgcagcgccagcaaggcgtttgcaatttggcgaagcgcgattgctgttgcccgtgcagcattgtctgattcatacaagctcgaccacctcagccgttctatcccgtgaagtccgctctggacggcttgtagttcaggcaatgtggtataagacttggcacctcgcggccggcgtatcagttcgagaaacggtatcgtaacggcaagcgatctgtccaggcagacgctgaaatcgtcgtcagaggtctcaagctcccgcaaagacctcagcgtctcctctagcttcagtgtcagttccgtgggcgcgagtctggcgggtcgttttcgtttcagttggaggaccagacacagccttctcaagcggggacctacccaacagcctggcgtcgacagcgaatcagagaatacttcataaagggcgaaggggacgatggaatgggttgttgatatggatcgcggaatagggtttcaggaaatttgcggagcatacaattcagtcccgcacgaccgtcaatgtcgaggtagtcgctgtattataaatatgcgatcggcgagtcatgcagcgcagaccagacgggcaaaggggtaaggggctctgtcgacggtacaaacaaaggagccagcaaccccgttcgcagcacaaggaaacatctgtcacatgcgatgaagcgaggaggcgactatccatcccctcaccaccaagtgtctggtgggaggtcttggtctggctgaaattcgcccaattgactcgcattggatgcgctgaatgcattgagatcgaggaagcgcaggtcgacgtctgtatgggcgaggcgtcagtaccagcgatgaaacaggtctgttagcgaactccttacctggaggtaggaagaagccctcgaggcccatcatggcgttgttgttctcggtcgtctcccctagcgactctccgttcaagaatctgagcgggcaatgaatgtctgtcagcacgaaataggccagccattctgagattccagctcacaatggcaaattttggtcgttaccaaaggagagaccggcccgattgaccaagtcttgcatgaagctagcgtcaaattcgtaactttccgggttcgagctgggagactcgtttttgccagatatattggtcatgctcattagcggcgaagtttgggtcagcatgggtgtcatgccggtggtatggcccgtcatgctcatccccgattgcattgtcggcgtaggcagatccgggtgaccgagaccagaccatggactctggctgctgatcgaaccgcgatgctgaggtaattggctgtgcgtcttgtttggcgatccgggcatcgaaggcggaggcaggtacttgcttttcctggctcgacggagcaatagccgtagggaccgtgcgtatcgcccagccgggactaggatgggcagagacttttagctgaaattcggcaagaagtcgagcgtcgactaggactcaccttgttcaagaacagaggccaattcctcgacatccttggccgttttgcgcaggttgagctcgtgagggaagagacgggcgattcggatgagaaaggaggcggcgaacgcagccgagacgtctatggtagcggtgcgtcaagtcagctgacagtcgagccaagcgattctagacaagcacttacgggtgtaatggaccgctgtagcaaagcattcatcgaatatgctctcaaaagtcaggctctgacgatgcgggcgcccagctatgcctaaacttaccgtatttgaggccagccctgtaattctcaccacgaatagctatttcgagacaagactgagcgtttcgcatggccttgatggccaagtccctcttgtcgggcggcatcctcttgacatccgcggcatccttgatgcccctgagcaactgcgagttgatgaacaaggacgcataactccgctgggccaggagagactccatgaaaaaatcgttacgagtctttccgtatcgctcgatcatgacgcgctcccaataggtgagccagcggtcgaaggcgccgttggcctgttgcagccgaactacagtctcctggctgacgggttcttccggagaagtcgtaaggacgatgtgcaatggcgctcgcaaggcgatcatttcgaccgtgctgatcaacctgacgtcggtagcgatcgatagcggatgatcgaggaatcgacgacactcggcgatcgaagcgtcttcccgcaaaatcgccggtcgaccggtcccatatgacatttgatgttcgatcatgtagagcgtaaaccagcatctggcctgaatgaccaggtctcgctcctcttccagttgcgccggcgtcttgccggcccccattcttcctcgcagcagtttcatgaaggagtggttgatttccatatctagcccgagacgcacggcatgacccgagggcaaccaaccgttctgactgaatccggcgagcactagcgtggcctgaacggcttcgattctggccactggggtccacatggtccccagcccgattttcctcgcatgctcggtcgacgccctctggacttcgctgatgggtcctcctccatccctgacccgagctccgacggcgacgatggccgacaggctaaaaggagaccggagcctcagcgaatcccacgtatcgtagtcaggatcgtaaattggcaagaaagcgttgctcccgctaaagtaaaggtcgaatagctgtctcgcctcttcctcgtgaacgaccccgagcgagacgacgtcggggaacgcgtgcacgtgctttcgcgtctttttccccttgccggatcgatgcgattcgacgatgatgcccggtggattcaaagctgccgcagctcgttgtatggggtcctttggaacgacgaagacggcatcgtccggtctgtctgtcttgcgtttcttgacctgtcttccatcgtcggccttgttatcgcccgtcctgtctcctccgccaccttgagcgtcttcttgctcagcccctctttttcccgcctttcctcgagacgcagcgccggccttattctcgctgtcccttccaggttcatcagccgatcctccctgtcctccctctgcgcccggtccggatttgatacccgacctctccgccctagctctctcgaccgccgcctcggccaacccggccatactgctcatgttggccaacggcgccgtgatcatattggtgaccaaaccgtcctcttcctctccgtccgaattggtgggagaagcgttgacggacgtctctgacgacttgaactcgggtttgcgcctcgacctccctggcgtcaacgccccgaccggctgtagccccgttgttgaggaatgttgctgatgctgcgtctgcagatccctaggggtatcgccggggaggagggaagcgatccctgacggttcaaactgataatcccagcttgtattattggtgtactctccaaatcctgtccggttcgggattgcaaacccgccctcgtcccacatctgcgccgggtgagtactcttgcccaacatttctgggttggacgtgttcctcgggtccagggtatcacgcgggccagggcctgaaaaggaagatagcctcatgctccctcgcgtattggacgtgtcaaagctcgttcggtaatccgaagcgttcgtagcagagcttccgtaattgttgagcctcatcagcgagtcgggacgagggacaacgacgttcgggttgttgctattattcgaggtcccgcctggaagcgtcgaggaagacgagccgaacccatctaggttgggcacgatcaccggttcgtcaaatacgttcatcccgccgattcccatttgcgctccggtcgctgcattattgttgctcgcttggccgcgctgatgaccaccaggttgactgctattcgacgaaaccggtttccccgctgcgtccctctgatgtgaagatgcaggactagggtagtatccttgtgggctgacgctgttcgtattcgcagtcggggctgcgaccatgctggacgatttaatggcggtgactagatcggcgagggtgctctggatggaggtgacttgatactcgaggtgtttgatccgactatcacggcgggcacgtggacgaggtacggggtataagccgctgggttaaccacttgcgagccgaggactctgatcgatcgccaactcgtttctaatcgacttactcgtcaccacctggagcatccaagctgctcgtcccttttctcggcttttccatcacacaatcttcccctgtgacccgacaccttttgcaaggcggatcgtccgctcccacacacctcatcttcattcgtcgacaatggttacatgctcctacaaagacgacggggacaagtctatcgtcagctcgtagtctggattgcgtcttggaatctcgttcccgccggcgttgagtcgggactcgggccatgcgggccgtgacgaggacgaagctggattactcacggttgaccctgttgatcccactgccaccctttccatcggttgcgaaatcccgaggagacttggactcgtcatcgggtaatgatgtttccttgcccttgcctttactcgacatggtaggctcggtcgctgctgggtacgcagccggtgtgaagaatacccgggacgtccgtgtggtgggatggtgagagagtcgtggtcgaccgaagacgaacgagaagaaaaacctcccgagatcgggtggtctacacaacgagcagcctcaacaggagtgagtatccgtatttttatttgcttgtgtgtactagtgtctatctacgtgcgtatgtgtgaacggggggatgttacctatctcgtggcctggttaatcccaagtcgcctgttgtcgagatcggacaagttcggaccggagagtcacacgaatcacggcaccgaagagggaatcaaattagcttccgcatcatcgtcttcccttgttttggggtcacttgaaacactcgacctcggtcgagtggtcaaagggaacgagtaggctagtagagtgaccgtatacaaggtctgagtattatgttccttattgcggcagtcgcctcggacttcgaacaaatcgcaaattcagaaccgacgagaatcgcaaggtactcagctttagcgcgcgccacctcgcagcgtctccctcgatcttggcgaacaacaaatcacgacgatgggctggttcaagagcagacgatctgataatcgccccccggagtcctttgcgtacgaaaagtattacgatgatgatgatgaatatcagagacgggatggaccgggcaagacgacgaggctagcgaggtttttcagaaaatggctcttgcgctcacaagtctggtcggtcatccagggattgttctatatcgccgtgcacgtcggaatcttggtcggtcgtgaccttctgctgtgattttgaaacagatggctgatattttactgtttgacgatgtcttaggtgcacgatatgaacactcccgaggtcagtcagcaggcatgcaagcgccatccttcagcttgtcccgctaacacaccccatcatagctgaaagcatacctagaaacctattggtaagtctgcgcttcttcaaccccacactctatccccgctaacaccaccagtcttccatatatcgaatccttcaatctcgtcggcctctactgcgcatctgcttgcgtctatcgaccttgatcacgaacacgatccgttttctcaggtgggggactggcgacccggacgctgagctcccctcggcgtcgacctggtcattcaatgaactgtgttcatactttccgaatacgagcattcccaaccaggggcacgggtctggtgagtcgcttattgctcatcgtcttcgtgcagatcatgctcacggcccatgtgctcctgcgtctgggcgcagaaccgttcttgtactttgggttccacgagacgggcatcagtgcgtcgtaatttcccgttggataccggagatgggcgctgaccaaacggcggttcaaattcgacagtcttcctgtccatcttgttgatcatcgatgagacgaccaacgtgaggttcgggatcctcggtcctcaggaaagtaaagggggggccgcttggacttgtttctagtaggtccagcggagtctcgaaagtgcggtggaataggacgaaaaccaggagctgatgtgcgttgggttcgacagcctgttcacggcgaccatgtcccgttcattcgcattcagctcgaaagggtaagttccaccccgaccgcccctttccgttgtcctacaccaaacttctgttgacggccgaacccgcgcaatcattcagcgtcactctctttgtgacctatgcctgctttgcctttctctgcatctcggtgtacaatatcctctacgccatcactggtcgactgatcgaccacggtcccggatggagtggttatcggagcagcgcgatgatccgatacgaggacgagtgggcggccgagaccgacaaggagcgacgcaatcagatcaacccgttcaacgtgggtgggaggacggctctgggtccgagaggcaagatgttcagattaagcaggtggttgagggactcgtctatctgggcggacgaggagaacgggcaggtcaaaggggtcaacaaaaagcaagtcggatgatctacatccgagagccgctttccgtctactgattttcgatgaaaacccgctcaggatcatccgtggtgtacccgtacgttatcgcgattccccctcagcctcgatgtacctcacgatcgatctacgtcgatggtgttctcaaaccgccggcctgtccatgcttctcttgcacgtctcgctcttcctgaaagacgtccagtggaaacagcgcatgtcgtacatcgcccagtatgcggcgatcaagtcgacgtgggacgggttgagtacgtttgggaaagggatgccgacggggtgtgcgtattatgatcagagttcggtgcccatccggatgtacctggatgcgagcgatcggtcgtccggtgagccgcacgtcgaggggttcgccataaggccggatgcactgagatgatggtccttgtcctcctgcactgtagcgactactaacacggcgctattcggcctgaatcaagccttcctaggcaagtcctaaccccgttcctatcactgacaatcactctacgcccgcgctgaccctcggccactgttggtttctcggcatcatcagtcatgttctcgctgagcgtcgcgctggtgagcatcaccaaccagaaagaatacggtaatatcgggttcgggatctctttgatcggacctcgaatgagctcggtcgggatcgggtggatgttgttgcagtgggtctctctttctccagttggagatgacaacctggtcgattcgctcgcgatctcatgacccgcccttgcatggtagtctttgctttgcgaccttttcccagtcactctttccggataccttgtggctgtactacgtttgcaaggggataatatattatacggggatcatcgggatcacgaacctggtggtaagtgatgtcgattacgcagctgaagcgccacgccacggcgaggtggagcttagatttgaaattactgcatatctcacgtcttgcttggtgcggacgccgacttgaacctctcgccaacaacacccggtacccgctcgtttactgctctagttcgcagaaagcttggctctcgaagaccacagacacgaaaagtttggcgcaagaaacccgttctacgggggattcttcaatttccgaagtttcgagcgtagtgatgctcccttcacgccggtcagagtggtgccggagaagaagtaggagaccgactggcagagagctgggtcagttggggtgtacacatgcgacacagatctgaagggcattctgcctcgggtcctgttcgagggtggatctgaaagtctgaaacgtcctttggacgatccccggtttcatcgaaatcattccatacccactttgcactttgttctctggaacttctcgcgtgttcctcctggaaccaagtcggcagcgagaacagggcggaagcgatgacgacgtgacgtcattctcgtcagaactctgtttcgcttccctgcctgcctgcctgccaccctgccctcccccttctgccgccttcgcctcggctgtttccgcttccgatccactttcttgatgatgatgatgatgatggtgtttggtctgaaaatgtcgtcatttcccttttacgaccccaaatcgtcgtcgtcggtcgaaatcgttatataagaatcaaccacgagttatcgttcagacctcacgcccaagcaagcgttccagtcataatcccacaaacccgcacaccgtttcttttcataccatgtcttttgcacgaacaaccacccaatcccttaggctccgtgccgtccccgtcgtccgatccaacgtccgaacccgtggatccggctaccgattcaactcttcccaggccggcggtcaacagcaaggcggatttcaccctgccgccgccggtgctgccgccggtgccggtgccgccatcctggtcggatacggtgcgtacaagtacaccgtgagttcgagcgaccagtcgtaacgccgagacgaggtcgactgacgtgtcctcctctccgtccactcgcccatgtcttttttttgcttttccaaacgacctgtttcgatcacgcagggtattgacaaggccgtcgaaacctacaccaccaccaagtcttacttcaacaccgccaccgacaagctcaagcaggctactcccgagcccaaccaggccttggaggccttgaggagccaggcttaccactatgccgccttcatccccggtggacgaggatacgtggataccgctttcaaggacattgacgccatcagggagaagcacggcgaggtcagtcaatcgggttcgagatcgcgacgaaaagcgtcgatgaacgaatgacgacgagctgacacgacggatcacatttcgaatcatacaggaagtcaacgccatcgtttcggactcttacagccagctgaagaaagtcgccgaggagaagggtttctcgttggacgccgcctctcgatcgtgggagatcctccaatcttccctgtccaagatcaccgacctcgctggtgacgctgccgaccagatccttgacaaccaccccaagctcaaggaccaggtcggtggatccttcacccagctcaagaggatgggagagcagtacggacccgaggccaagaagcaggtcgacgacgtctacaagcaggtcaccgagattgtcaagggaggcgtctcgtttgacactgtgagcaagatcaaggcgctcgtcgagtccaagcaaaaggatttggccaagctcggagatgccgcctggaacaaggggatcgagcaggcccagccttacctggaaaagacccctcagatcaaggagctcgtcgagaagaacgccgacgcgctcaagaacggcgacatggcccagttgtgggaaaagatcaaggggggtaacgccggtgacattgagggtttcgtcaagagcgccgccgagcaggccaaggacaaggctaaccaggccactggaggtggattggacaagtacctcggcatgttgcccgggttgggtgccatcggtcctcacctccacaagctgaagcaggtgagccttccgagcgcaatagatgatgctcgtgtttgctgaccccgctttctcccttttgtgtttcatgcgcacaggtcgccgacaccaagggtgatgatgccaaggacctcttggagaagacttacaaggacatcgaggaggtcctcaagaagcgtgtgggcgaggccgagaagctcgccaacgagaccaagaaggaggccaccaagtaggcgatggaagaattggagtcatagtcgtcatcatgggactcgggcctcgagaagaggacggtcgttaatttgtatccacaacgcaaagcgtcaagcgcgaaaaagaacaaagatcgggcatgggatcccggtatcaatcaatatacatatatttgcatatccaaaaccattccataccggttacgtcgtagggagtgtttgtcaagcgggatcttgttgccatatcaagtgagacagtggagggtggtagtccgactcgccgccgggtggactgatccggtggagattgcaaggcgaatacagtcagcccaagaaggaggaaaccaaagtggaatcacgaggcgagctggataatatgctattatatgtgaattgaatacgttgtatgcatgagtgccggctatgccattgaaacgttcccgctttgcatcttctgacgtcctttgccggcatggtcatgagaccacttgtatcccaccctgccgaacctcttacaacctgttcgtccacgccgtccaccatacgctcggagccaacttccagtccgccttttgcaggtcgggatgaaacggattgaagtccagcgcttccaatcgtttcaggtatctttccgctgggacctgcgtcgtcatcgccgtcgtcgtcgtcgccgcggtcacgtacgttagcttcgttcgttctgcttttcgtcgatcgtgcggcgatcgaaccacccgcccacttaccgcactcaggaacaacggggtgacttcccccggttctaccttgcctcccgtcgacttcaggtgactcctcgccgtgatgagttcgtccatcccccgggtcccaatctcgaaacaagcgtccctcaaccccttggcctcttgtccatccctgaacacttgttcctcgaccaacccgttcttcaaggcaatatcccttgggatggtgaaacggcgattagagatttgtaggggaagcgcccgcagtagggacgtcgttgtcaacaaggaggagaggtgggtgagagtatgcgatgtggatgaggtgctagggtgtgttggcgggaggagtagcggcagcgggcccagtagaagagcgttttgaagcggggcgtaatggtccagatgagcttgtagcgttggatgtgatgtaggagccgatagggaattggcctgcgtgcatatgaatcagcaatttgggggtcaaacatcagtctgttggctcgtccgggaacgaggcggccgtgtatgggctcaccctgacgtcgatcatctgtttgaggtaataccgctggaccggtctcgccagcttggcttgatgcagcatgagtgccacggggtgattaggcggtttatcctgtgatcacgatacgatacggtgacagcgccatgagatgagctcgaactgaatctctcgagcagcatgcaagaagtgaacctcgacttcagactgacctcccagatgcctctcagagcgtcccgccagaactgataccgcatgagcgcgatggtcggttgtttgacattgacctggacctgatgcagctccaactatcatccggaacccaggcgaaagtttcagcatcgagcaggatctcgccctgagctgcaatgaggactcacattgaacgctcgccaggccaaccacatgtcccgtaattccgtgtcctgtccaccaggcgacttgcttttgacagcatgctttggccagaaatgcgctgtcatccacgcatccgggtcaagtcggcgtacgagatcttcacagtactctgaaggcgtcgagatcttgcccgattgtggtgcaggtgcgggagaattcaaagtggaggtcgtagcgtaatgtcgttgcgatgacgaggctcggccgatttgcaaggtcgttgccagcaagttgccggtagctcgtgtggcagacctcattgcagatgtgttccaagtactgtatgcggtcttttgtgtcgtcacgattgagttgcggtatgcagtctcgaacctctgcaacgttgtttctacgttgaacaggtcgatcgagagtgagatcgtgattgtcgtcgtcgtcatcaagcgcgagatgaaactggattgcgcttttaattggttgactcgcccccttcacctcgcggtaattcgtcatccaccatgtcgcccgcgcccggtttcacaacctcaaacaaacaggtgacggctcgtgatgtcggcacggtcatcattcagagcgctctattcccttgcttgatctcgctactcagagatacactttcctttgtcattccgtcatcatcatcactatcctcgccactctcgctgccctaccgtaggtatccgggtatattaccgagaaggcgccaggcgtggtttgggtgttagctcgggtgacgtagtcgcgccaaaggaaaaggtggtgggtttcggttcccatcccatgatcacggcaccggaatccctgtttcttcacacgtataagagctgagtggggagactagctgacgggaaacaaagatgagtagtgtttttacttctcataagtctaacccgtcacgcacagctctttcgtacgaattttcaactaaaagtctcaatcattatgtccactcgtgagtctaaaacccaacgtcaccttcccgcttaatccgatggtctcactgaattggtcgctcctgtctccccatcgcagggaccgacctcccccaagccgcctcgaccaccgcccgagacgtgctcgaacagtcgcaagcagccgttcaagacaagcttgcccagcccgcatccgaccaccctgccgaatcccgtgccaccgaagggaccaacgagaacatcgtcaagggaggacagagcgctgtcgtcgatggaaaggccgtagacgcgcccgttggagatgctagaaagtaggcagagtgacgacgaggtgagtagggcgttcgacgggccagacgacatggaaggctgatcccgggggctgtttgtttttcttttttcgtgcaacaggtgatgcaccgccttcggctctttacaagttcttaaccccagttccccgaacgatttgatcactggacggctccatatattatcatcacatcatcggcatgtcgcaaagaaatgtatccctatcgtaaacaatgaatcatcgaatcgtgaacatgctagagcgttacaaatcgccgaggatcggcgtcaaaaagtcgtccccaagtgtcataatccacagtgttagacgaggagctcataccccgaccccggtatcattacattaggggtagtggtagagccggttcgtctcgctcgtccgtgtcgtgccctttactagcccttaaaaaaaggtcgttccgggtgaaaatcgtcgtccatcaccttctggaccccgtccttcgcgtcatcccctttgctcgttacatctcgtccctcgtcccgtgtcgccgacttgcctcacatgatcaagcatttgcaaccttccttcttgccatgctgatcagcctgatcgcccctgaccctcgtcatgttgtcaggcgcaggtcgagtatttccggttgaggctgcaagaggtctagcaagcacgctcgcgtcccaaggttgacctcgcgcttgtccgtgccctgcattcgtgcccatgctaggacgcaaatcctctaatcttatactcgtcagatcacgtccagcgtcgcggtcccgaagagactgctgcgagcgttgtcgtgaggagatggacggtttacgtagcagagaagcttttcgacgcaggtccggctccggagtggggtgcacggccaacaaggtctgatcgaggggcacgaatcggtccgactggaatggagccggagattcgggcccatctggtgggatatagctcgagctggcaaacgtgagtgacggtttgcgtgagcgctgtgagtcgagtactgggggcccaagttggagaggtggatccggggtcgtcggctcaagggaaggtggctgccgcaaggaccgcttcgagcttgatcgtcgaggtagggcgctgggcgagatggcggcgggggacaacgacgagttgccgacttgactgtcaggctgtaagaatgaggtcagtctttcgtcggtgcgggcggactaggcctgtttcaggacgcacctcagactcggtgatgccactgggcagaccaccggcaagactggccttgctgaccatgagcggggcaccatcgagaccccagacagtcaccagttcgtcgtccttgagaccctcttttgctagcctctcccgcatcaaccttcgttcgaccgctgggatcgggacctcgtccgctctgactcctttaggcagcgtctgctgcggaatgtaggggaccaaaaaagcctcgggaaactcggccagaccgccgttcgagggcgaattggtgagtctgccggaatcgctcgcagtaccaggggagactgcacgaggagatccgcgagctaaggtcgaatcgggacctcgacttaggcgacgggagaccggcgtggaggtcttgcccgttgttcgacgggtcgacgatgagggtgtcggtgtggcgttgagcgtggatggggagtctgcgagtcgtctcgttgatggcgaacttttgaccggagtcgtcgttttcgagctgggttgtcgcatctgggcggtcctgcccttggccgtcgaactcgcagaggtcgggatggaggcagtccgtgtggaagaggtcgtagaagccatcgtctcggctcgtcgacgaacagcggaagtgccggcgggcgctggatgcggtgaagattccacaaccgcctgatcaaggacgttggaatggctgcctgcattaagatcgtcgctgcgcggtatgggactatcccgcaagctttcccgatcgaccacgaatggtgcaggttcgtccttgatattatggtcggcgggttcgagatccgggacatcacgggacaaggtcctcgacagctcccgctcgagttcgcccgggttgaggctatcgcgcgaagggttgtgatctacaaacaaccgggaggacctgctagatgcagcggcgaggtcggggctcggtgtggggaatcggtaagtctccgaggtgatcgattcgggagagagtgcagtggaagagaggatcgatgtccgtttgctcggaatcgggattttggtcgacgaggaaaagtctaccgacgtcggtcgcaagggcgtggagcgggttcgagcgcgtgcattgtctcggtcctgttcgactcttggcgaggtggtcgttgatggcgatgaagggtaggatgtcatgggtgtggtgaaggattcgccgaatgtaccggatcgtttcctagcaagtcgagggctggtattgactgaggacgacggagagatgcgggacgacggtgggctagccgatttgatcgtcgagcgggtagcagcgacgggaatcttcgagacgatagctagaggtaccgcgagggtgtcagggcgggaccccgagtcgacaacagcattcccacgcccttcgatgtccattgcgagtgattctcggtggttctgataagatggtgtgacgatcatgttgaccaaaatcaagttggtcgctattttgattgatgtcaacgtgatcctttgttcaggacgatttggctggccgggcaaccaggaaagaaggctgtgctgtcaagagtcggatggggacaacatcggatatatgggatatctattggccatacccagctgtagatgctgtgcaaaatgtagcggaatcgtattggattcgagagatcgagctgatggactcgccaattgcgaattgatagtgagggttatactctacgatatgacgacggtctcggaggcaaatgagacacgaatatggttccgggaaacccgacagtcgacacagtgggtccggcaaggcagggttggatgtgagtgacagggattaggactgagaccatcgagtctagggcatatacacactgtctattagaaaaaagtctgctggtcgacctgtgcgatcaagcgtagcgacgggcgcgtaagggaagagaaaaccgagattcccgcgcccatggcaaaaaggtaattttccgacgaggatgtgattcgaacacatgcgacaaatgccataccctggatgcgtttatagcaggggcacccgttaaccactccggcacctcgccatgttatgcttctacaccgagtaatataaatatattagattaccaaataatcacattggttgacttaagcagctacgaccggtctagcgacaatcggcaggttgactgggccgactgccatgctgaacttcttttccgccgtagtggtcctaccgttggtcgtggtggttttgacaaagaattcgacgaattgaaattgctaacaaattcgaccgcaacgtcttgaccgagagaaccgagaaagggaaatcgcattgacgagagacacccccttttttatgcggctgactcgtataatgtattattcgcctcgaaattcgccgactgtggctgcaagtatacccttcccagtcgatgatagccttggggatccggctgtttcataatatgcagctgaacgacagttgaagtgatgtttggctttgctacaatgtcgatgacgcttcttgtgagtgtttaataatcagtacactccgtatgccactgcggatacgcctttaggtaaagactggttcgaacgagatgcatggcgtttgatcgcattttgagcgcttaacgctgttggaagcggggatccgtcacagatgctagaggtggcgggtaagaatgcggcactcacgaacttcgagacctagaccgcagcgcacggtaaatggtcatgtgaccagagccggctaaggatcccgagggagctgagcgcacaccgagatgacgggcgacatgacaagacggacgagcgggatcaccggcgaacgcctgtcgatatctacttaagagtggattgcagatggtcaaccttattcatttacagctacttgcttgatatcgcttcttggcattgcgggttttctgaaggggatgattacgataccaactgtaactttgacaacacattccgacagaggcctctgcgtaggtacaacgtgctttgcgaactcttttttgtgattgagtttgaggtattctggctcgaacatccacgactgcgctgctttgctgagatccttaagcccaattagggatgcattcccgatcagaaatgggacatgggtgtaaccatatcttgtacttagtcgttccacctcacttttttggatatggcaaatcaaagtccaggagaacacgcggtacgacgccgttgtgttgccgaacccttgatttctccctcagtcaaatggatgtagtgaccagaacttgtacgcgatcccatagccacgatgacttgtcaaccatcaatgtacgtaaatggctgcaaacagaccacgactctagggttgctaacggaacggagagtcctctcatcaagaattccgaacgtttgtcctgaaagcaacgggaggatggtaagctttcactaagagggagcgacacgggtacgcgcttgacgatttttgcgtcgatgataacgattggcgaacaatgacaatgataatgctgaatgaatgatgaaacccccgcctactacacgactacttgtatgaccacgactgaagtctcccttgtaccatatcgctgcgggtcctcagactcatcgcctcgcctcatcaaatctccggacgtgttcgtttctgcacaatgtatctatcattcattaatgtcatatatacggctacaggtcaggaagagagcaaatcaaacatgtacgcattgttggatccagcgtttagtcctggaaatgagtggaagataacggtggtgagctttttttttttttaaagtcgttctcgtgagacacttacgacctcctcgacgtcggggccggcgtctgcgccagctccgggagcaccaccgggcatgccaccgggagcaccgcctccagcagcgtacaacttggacatgatagggttggcaaccgactcaagctggaatcgcgagcagaggtcagcctgtcagttacgcactttcgacgactagggaggtgagtacatacctgagtcttgtggtcgttgatctcctcgatcgaggcagcctccgagttctcctcgaggaacttgatggtctcctcgacggccttgttaagagtctccttgtcagaagcctcgaatttgtcgccgttttcggaaagctgctgcttcagactgtatattaaaagaaacgggtattagcacgacggaaagtattggaaaccccccaaaaaccgggctgacctgtagctgtaagattcaagaccgttcttggcggcggtacgctccttgacctcctcgtctaatttcagataagggtcagctccattcaagggaacctaatttgacgaccagaacttaccctcggcagcgtacttctcggcatcagccaacatgcgctcaatgtcgtccttggagagacgacccttgtcgttggtgatggtgatctatcaggaaagaaaaaaagcccgtcagcgctctggacaacaaccgataccgtccacacgacgcatcgcaccttctgggtctttccggttcccttctcgagggcgctgacgttcaagataccgttggcgtcgacgtcgaaagtgacctcgatctggggaactcctcggggagcgggggggatacccgagaggtcgaactttccgagcaagttgcagtccttggtcctggcacgctcaccctcgaagacttggactgtatgagttcgaggtcgaaatgacgtcagcaaccggtgaatcaacgacggatacctggcgttggcgacttactcaagactccgggctggttgtcggcgtaggtggagaaggtctcggacttcttggtggggacggtggtgttcctcttgatcaagggggtcatgacacctccggcggtctcgatacccatggacaagggagcgacgtccaagaggagcaagtcctgagtcttggaagaagtgtcaccggtcaagatggcggcctggacggcggcaccgtaggcgacggcctcgtcggggttgatctagatcgaacgagaatacacgccgagtcagcactggggttctcgacgaccgacgaccactgctgcaggctggactcaccgatcggttgggctcacggcccgagaaaaagtccgagaccaacttttggatcttggggatacgggtggaacctccgaccaaaacgatctcgttgacagtcgacttgtccatcttggcgtccctcaagaccttctcgacggggtccatggtggatcggaagaggtcctggcagagctcctcgaatcgggcacgggtgatcgaggtgtaaaagtcgattccgtcgaacaacgagtcgatctcgatcgaagtctgagcggccgacgagagggttcgcttggctcgctcacacgcggttcggagtcgtcgaacggcacgggcgttgggggacaagtctgcgcgggagcaacgtcgacgtgggctaagttagtggacgatcgagggggacgaggtgaacaaggtcgtttcgcgcgcggactcacccttcttgttcttcctcttgaactcctggacaaagtggttgacgagacggttgtcaaagtcctcaccacccaagtgggtgtctccggcagtagccttgacctgcagagcataagacggtgaacgaggtcagccatccgattcacaccccgagagacatcccatcccgaatccactccgagactcacctcaaagataccctcttcgatggtcaacaacgagacgtcgaaagtaccaccacccaagtcaaagatcaagacgttcttctctccctcgctcttcttgtccaatccgtaagcgatggcagcggcggtgggctcgttgatgattcggagaacgttcaatccggcgatagcaccggcgtccttggtggcctgcctctgcgagtcgttaaagtaggcggggacggtgacgacggcgtccttgacgtctccaccgaggtaggcctcggcggtctccttcatcttgatgaggaccatcgaagagatctcctcgggggtctatcaagaacggggcgtagcacaatgacgatgacgacggcggtgtcagcgaaactcgtccgtcctgcttgtctagctcgtgtgactcacaaactgcttctcgactcccttgtactcgacctggatgacgggcttgccacccttgtcgatgatcttgtaaggccagtgcttcatgtcagcctgaacctcctcgtcggcgaactttcggccgatcaatcgcttggcgtcaaagacggtgttgtaagggttcatggcgacctgtaggaaacacaaaggtcagtcgacgcaagactttgtgctggggaagcgcgcgggactcacctggttcttggcggcatcaccgatgagacgctcagtgtcgttgaaagcgacatacgaaggggtggttcggttaccctgatcgttggcgataatctcgaccctgtcttgcctgaaaacggcgacacacgagtaggtggttccgagatcgattccgacggcagcgaccatttttgcttgtagtttcgttggtgttggtttgggttgggggggtaatgaggctcgttaacgaatctgtttttcgttgcctggttgaggtttgttttgttttgtctgtgtgaagagactttacttttggagagaatcgagttgtggcgttgaaagtgaacgagagatgtgcgttggtttacctttgaacgttttataaactcggtggtaggtggtggttacgtggtgatctgattccaacctttggggcgtttttccgcgcgaagacgtcgaacttgctcgaacttaccagcagattcgagaaggaacgactcccgcaaccaacgacacactacctcgatcgctctcgaaacatcaagaaggacacgctcatgaaatctcgaacatactctagccaggacgacgaatcgatctacctgttgcattcactttgaacagcgatacgagcttctcgtcgtcgtcgtcgacctcaacctaaagctgacgatcacgtcaagagaaagttccctcgcaactctagctaaactgaacattcgggaaccatctcctgacgcgcgcggggcagcggaagcaaggagaaggatgacgagatgtttacgaaacatgacttgaatggaaacgccaccaacctgcgcgcttccttctggcatcctccaacccgactcgactcgactcgactcgaaacctcgtcatgattcgtcatatcgatcatatcgtcatcaaacgcgtagggggcatgtagcgtgtagagagttctgacatcagctgtattcgcagtacgcagtcgctctaactcggcgccatagtagagtagagtgggtccaagctgacgtgtacgaccagggcttacttgtcgattaccccggagattgcgaggttgcgatatcgtcagcgaccgaaaaattcttgtcgttgattgtaccaggggaagaggtacgtttggaggcgcaaagtcggaaacgatgcaacacaagtcggggacggtcaaactgctcagactcgacctcgtaaacgacgtagtgtatctgtcatacgatgtcagcagtgcagatcatcgctgatcgctctcagaaacccgtgaaccgtgatcgttgcactacatcgctggtcgggaatgagaattataatatgacgatcgcgtcacgaaagacgacgaccggtcgatgtacttgtactggctacatgatgttgtggattatacgatctaaacggatgatggttggaaaaaaggggaacccgggttcttcgagcgcctatccggaggggacccagtcctcattcgtaaccggtcttccagcgaaaagcactcgaatgtctaagatggttctcctttctctggagagaacgttccgctactcagcgtttcctcttccctaggctctcatcgcgctgggggcggtttagacctcacggccgacagcagtggcggtcgaagttcggggctcggcgacaccgacggcggtcgagtcggccctagcgttcttcctcatagagtccaactcggcgtgttgagcagggtgagagatgagcgaagcaccttcggagaatttaccactgtgggtcatcatcaaacgttcaaggcaaggtcagcccgccgtccttggcccggatcgcgtacacagatgagcagactcacgattggagttgcatcttggtgtagtccaacttggacaacatgtagacgtgcaacagggtgaacacgggcttggcgacaaagtcgagcactccgtaaaagaccatctcggcggtaggggtgatgatgttggcaccgtcagcgagaccccaggcgatggggtaaaaggtccagacaaaggagaggaaaacggccgaggtgacgtaggcgcgcttaaagtctaaaggtgagcgaggcgagcgaagcatgagacgatgagcgacggcgcgatgacatgactagatgggcctcgttcgacttaccaggtccgagcaaggtgaccgatcgcatggcgggccagaggaggatgaaccagatgtagaccaaggcggcacatccaaaggcaaagtaaccccacttgtacgagctgacgaccaatcctccgacaagaccggtgacgatcatgacaatgtcaaagaagatcaaggcgataatgtccgagaggggcagtccggtggcgaggacgagctcgagcaagagacacggggtggtgatgatccagtcgatgtacctgacgtaccagatctgcctggtgtagccaatgtcgttgaactcgacgtagactggggtggcaccgaggtcagaggccatcgaaaagtacgactgagaacgggagtcgtcggacgtcagatctgggggggaacgcgcaggcgacacggggtgtagactcacgatcgaagcggtcgtcaggataaagacgctcaagtagtggaaagtcctccttcccttgggcaaggtgaagcaccaggccaacatgaggaggtcgacgaagagcatggcggcgaagatcgcccacaaaaagttggacgccttgtaattgatgttctggcggggccggcacaccgagagtagacaaggtcaatacgacattcgatcgaatcaaggggcaagaagcaatggatcgactcacgatgtccgcattgggagggttgacgtcgagggctcggttgaccatcttgaagggctcggttgcgatcgacttgaaggctggtgtaaggtggtcgaaagtttcaaggatgaaatcacgctgagagacaagcaagtcaggtgaacaaatgcgtcgaacgacctggaccaaaagcgatcgcccctatatacctatgtaaagaaatagctcgatagctttttcactctggcgatacacgggcagctgacgtagacctaaggcctaagggtggatggatacgaggccgggatgacgactgatgtcagcgggtggcttcactgctgtcagcagccaaaaaaaggactctacggaggtggcggcggtcgagggcgagtcggaggagtgaaaatagacgtaatcaggcgacaaggtcggagaatcgtagctcgcaacaaagaaccgaccgcgaccgactagaagaaagctttgcagcttgcaagctcgacacgagatgagagaccggatcgagattcttcctatcggcggatacttccgctcgtcatagcatttagcggttcacatgacctgattacgtcccccccttgggctcaagcggaggtgcgaagggaggagggaatggtggcggggatcgacaatgaccggccgaggtatgacgatgatcaccgccccactacggcgccgctcttacgccctcacgtggagctgacaggttgaaaatgcaggcaagggcattgcgcagtagaaacgtctcgaatgcgcgctagcgttcgtcgctcgcctttgaactatgatgtcattttataatcgacgtttcgcgtctcggtccgttcaattcgcgcgaccatcggtgccgatcgacatgccgagcgatggccaccaggacccccccgcctcttgtattcaaaacacggccaactacagtagtgaaagaccggaacgacgcagacgattctctgaataggggttcaggttcggaggcataagtatgctcatcgcactgtcgctccgggcgattagaggcttttctttgcccggcatgcgagtgacaccccgatacggtgcgatcgcggaatgtcgtctgtcacgccgcacatttcgaggtcgagctacttgcgagaacgggtgcaataatgataatatcatgctgtatccatgccttcatgctaaatatccttctgctcggccgcgagctctctccccttgaccacctttctcgccttgagggcctcccactgctctggaaactcggtctcgagcatcgacctgacctcgatccagtccgacttgtccctccagctgaatctgacgagcatctcgagcacgggcaattcatcctcgtccaccctggacactgatcccggttcccctgtcaggaattcccgcttgaacggtcctttgacaatgtcacaggcctccatcgtcttgccgcacctgcacagggtctcgatccatgatttccagttgccatagccacaccggatcatatcccggccgtgcgcccattcccaaatcttcctcgccctgcccaaattgcccgagtacccacacgcatcgaggatgacgctcagtgccggtcggtaggctacgcgttgcaagctcgtcatcccgcccgtcgcgtccctctcggcgcgatgccggacgacgatctcgttccagatctcaaacgtctctggccagagctggagttgattgtaggcatccatgagcgcggtcaagagggccaggtcgatatcgaggaaactgtcgagcttgacgatcgagtggatcttttggatcgtctggattgtatgactcgcgatcctctcgtccacgccggtcaactcgcccgagctcgagctggcggcccgttcacgtcgacgacgacggaggtaccgggtgtactcgttgatcatcatcgtgtacaccttggcctgcggggggatcccgacgtcccgcatgtcacgcagaaactcgaacgtgagcttgggcaagggccagggacttttaggcaagacgagcctgataaagtgttggatgacttggagatagtcgatttcgcccatgtcggtagggtccagtgaacggacgtacgagtacgctcgaaaggcatcgtggtgatgttcagcccggtccatcaggctgatcatcagacgcatcgaggacgagtgacccagtacgacgtgtcgtcgacgcatctcgtcgagcaaggcgatagcatcggggacgacgttggtcccggcgagcgctccgtccatgcagaccatgtagatggatcgcaaggcttcatcacgctcgaccatgcgtatcgaccgtgcccgtgctaggtcgtccgactcgtccatggctgcccccaaatccgagcgtacattgttgaccctcgcatagtcctgcgtcgacgtcgccaatgtcaaccgatcgacaatcatcttggcgagcgggatcgtgaccctcgcgccggccctgacggcgttctcataagacgtgtagatcgaatctatacgtccttgctcagtcgaccccgatgccgacgagtcgatcatccggatgacttttccaaacgcccgctcccacacgtcgtccaccgggtccaatccgagcatggccgagacctcccagaccttgtcgatatatccgtcaggcagggtctgcacgtcgatttcagaatcggctagcgagtcgagtcgcgcagagaggacgagctggaacgtctcttggtcgggcgaaacccctgcgcgtctcatctcctcgatcaagccggcgatcgactcgtctgacggctcgcccgccgctcgtattcgtcccctgatcaacgagttccaccccttgatcgtcaacctgcctagctccctcctcgtccgtaaatcccgctcgagctcctcccgcatctcgtccggtaccgaccccgaccccgaccccgacccagggagtgacactggcaaggcgtccaacaaggccgtcgtgatcgtctcgtcctcgacgtcagaccactcgatccccgcttccctccccaccgcataaacctgtctagcctcatcgggccgggaaacctcgtctacgatcccccggaagagatccacctgatcaagcgtcgaggcacctcggtaatccttcagggtctggaggacgaccccgaacgccttttctccgacctctttatgcttgtgaccctgcaagacggtcttgaggacgacgagcacgacacggaccggttgttccaagaggtccaacccgtaccaccctcgatcgttcctctcgatgagcaagatctggatcccgaacgccctctggaccaaactcctcctcccgcattcataggcgctcttcacccaggcgtaggtgcctacctcgccgagcgaccggggagggactttggggttggagagggcgaaccggatgacgtcttctacgatcctgcggttgctcgagagtgagaggaggtgcagccctctttccagcgtagggatggggatgggcgtggacatgggcgtaggcgtatcggcgagtggtaagcggatgagtttgttgtatgtcgatcggaggagctggagattgttggtatcgagcgctcgttcaaagtcgtcatgcagcaaggcgtgcgtcggggatgtcgacgtgtttgctgacgacgtcgaagctggggatgagacgggcgtggcggtgagctcaatttgggttgcagcttcggtggctggtggcgctggaggtttgttgcgttcgaaaaaagaggaaaaggccgaatgggaggacgtcgaggtggagagatgacgagtcgtccgggtcgatcgtgattgtccctggagtcgtcgtccagaccctgctgtcgacaactttcgtgacggttcatggtcgaacctcggctgttgaacgcgatagtagacgcagatatggtcaaacggcgatgttgttgtgtacacacacacacacaatgcctatctgagtgactcacgagcagagctggggtcgaccttgttcgactactaatggtcccgcacgacgagcaacattgcgtgcatgattgagccaaccggctagtacgcaggtgactcatcgtccgtctccaaatccttcactagtacgaggtgggttggtcttacaggcgatgcggtggagggaatacggacgtgtgtcatgatttcattgaaattgactgcctgccttgaaccaggagatgattctatgccaacttagctggaattgcgcggtgaattgagcgaacagtccaagctctgacccataatggctgatgatgattaggtaatcatgactacggctagtctcattatcatatcgtatccgcggtttgacccgactctacgttgaacgcttgacccagcccagtctcgtatccaaccacaactcgagcaaagtcgacctgcgacctgaacgctacccaagatcgaaacatcatcatcccatatcacacgcacacacacaccaactcacacatataccctccctcccccacacacaaccaaaacaaaatccatcactcaagacaaacaagatgcgtcctactgcccacgtcgagagtttgatgcctaccggtcagtacactccggggacggaatagaatgaaaaagggtgaaaagggtcgagagctgacactccctccgtgtcggtttgcccgcaatatctcgtcctcgtcctcgtcctcgtcctcgtccataggcaaggcctacgtgcgttacattgtgtccggaaaccacccatacacgggtcgactgacaaagtcttgcctcctgtcttgtcctcttccattctcttctcttcttcactcgctcgcctgcaatggtctcgtcctcgtctctggccgaacagatcggatggtggggtaacatgggtggacccaagcagaagggtgtcgtaacctacggtgagccgcacctccagaattcccatcttgctcgcctaatacgctagctctaccgacgagcaaggacaaaagagagctgatacagtgttgttccttcatccccccgatcgatcggatgtctatcatccacctcttacctctgtcattcgctcctcgatgtccgacatcctctctcggatcatcgcacgtcgtcgtgatcaccaacccgatccgtccctgtccccgccgtcgccatcgccctcgtcccccgccttcacctcctccacacgaccgaacgaccccactcaccctcacccacttcacagccgtctcccccgcccgtcaacgagccttcaagggtgtcttccacgggtacatctttaacgggtttagcaggatgatgaggcaggcgccttatgtcttgttgcccgctagcgtcggtgagtcggtcggtgcccccctccctctgagctgcctgcccttcgcctgccttgatcggcgagagaaatccgctggatagggtcgttgtcgttgggcgaggagcgggaaaagaaaggaaggcgggacagagagagaggaggggctgatgagattgattgtcgttttctctttatgctcgtcctcgtccccgttcccgtcctcggatcgccccccgctggatcgcctgacctcgacgccgtacgccgtacgcgacctattcgctggacgacaggttactcggtctactcgtgggccaagacgaggtacgagtggaacaactcgaaagaggtgagccgtcccccctccccccggttccgaagacgtggctgtgtcggaatgagtagcgctggtagtcggtactgatgacaagtgcgtctcgtcttgtttttcggttgatagggccaccacatcctcgcccaacaggccggtggacattaaacggagagatgaggaagaagaaagacgagggagaggcggatccgtcggatcgacttttgatacgatgggcgagaccgggggggacctgggcgggagcgttgtaaattcctctttttccctttccgcatgcccgatgagcggagaaggatggggatcacggtcatctgatcagacattatcattttgctagaccaagcgggggatgtgggtagcgcaaggtcgggttcgccagtcatgccagtcaggtgtatgaacagatcggttcaacttggtcgacgtgttcctgcagaagcgtacagttgtggggtgagattggcgatgggaggcgggaacggctgttatgggcgccgacaactagtctctcgccaattcaccaacgccttttatcccccgggcgtgtttggtaatgtaaggggtcggtgagagtctggacgttgatctcaccctacatcgcgacgggcgtttcgtttgacatggccataaggaaagccaagtgctcgttcgtatcgtttggcaaccattctgccgagtccgacggtaggaatatataaaaaaatcgacctacaacacctgattgacatttccgatgtgagcaaagtgaaactcgcgaggttgctgggtgaacgaggtcacgcgagtgaccagctaccaaccgaggtcgctcggtgttgataacctcgatcagctcaactgaccgatcaacctacaacgatatgataccacgagatcctatcgtatggtgtcatccggaatagactagagagatcatgtcaatcgatcaatctgaatcgctgcagctgggctgtacataaagcctcgtgatcaacgagaaagggacattttgtcaaaggcatctcatcgcacttgtcgtaccgaacctttcaataatcggcagccgaccacactatcgacctaaagacctgtatatgcggcctggggttgataccggttctcacatagccgagatctatcgcccagcatctaccggcatcgacttttcagctaccttcgacgagcagtagtcgaagcatgacagacacgaagaccaacttgtcgttcttggagtggaacgagcacgatgtgcaatcgtggctctctcgacaagggtttgaacagtatactcagttgattctcggtaagcagccggcaacccgtgatcaaatcgccctgtggagttgatcccgtcatgctttaccctcaacagatgaagggatcaccggggacgctcttccttacctcgatcccactgcgttgcaagatctcgggatcgacaagatgggacatcggttgtccatatgcaaggccatctacaatttaaaggtcgaattgaccatggctgcggccgaggctgatcctgaagacgggttggtcgggtgggattggacagaggaggactggagacctgccggcaagtttcaccgtaccgaagaactcatgctacgtcgtgctgaacgtacctgctgcacgcttcctccggttcagatgaaggtatcgctcatcatcggcttcccacccaccaagcttcccaatcgaccctctcctcccatacgccgtctcaagctcaaatctcgcacactctctcaccgaccgccctctcgttcatgcagatgacgcagaggaacgggagtaatatcagcttggacggcgtggtccacaccaacctggacaaggcgttggaagagcggctctgggatgtcatccaggagcagaacgataggatctcgaatttggaaaaggagtataggaggctggcatcggcgttcgcagggacgagcagggtagggtgatatgggtatgaccgtgtgtatccaggggttgtcggctgacgtgctgttcccatactataggaccgcgctttgcaaccagaggcgaggaacagggagcggtccacggacaagcaagaggacgatacggtaagcctctatgagcactatgcggtcaaggcggaaaattcacgcgcatatccttgacacttcccagggcaccgtccgagctcaagttggtacatctcgtatgcatccttatcgatctcgaaatggcgaagaatcgaggctcggtgatgcgcacaccccagcgctgtcccctggctttcaagattacccaccctcggacccggttacgtcgacagcgccggtggcgttgagccgcggtatcgcgacgagtgggactcatgctacacctccttcgttgacgaggatgatgacgacgaccaccatgatcgggaacggtgtcgacgctcacggccagccccagacgagcaatccgagcgggtttcccttgtcaagtcccaatttgggctcctcccaagcttcaacgccgatcccgaccagtacttccgagcacgggcagactctgggcgtacgtacaccaggtacctccttgtcgagatcggcgacgacgtcgcaccggacgacccctggtacagccctcgcaccgacctcggcagaaactcccggcctcaatacctcgcgagcgacccactcggacggacaggcggtgtcagcttcagcgcagaagagcgccaaggatgccgctggagccgcggccaagagcttcagggtgaccttggaagacccgtgcttcaaggtcttgcccgcggctcttaagaaatacaacatcaacgacgattggaggatgtatgccatgttcatctgctatggcgatacaggtgcgtggacgatgtgcagtgcgccaattgggcgctcaagagtctgatatctggccattccctacgacagaacgatgcttgagctacgatgaactccctctgttgctgttccaaaagctcaaggaatcgggtcagaaaccagtcttcatgttgagacatatcgtgagtcacaaagaggagccgggctatcgctacctggctgatgcagagcttggcacccgcagaaagatatccggtcgcccactgcgatcgcggctagtaagcaggctactcgcaaacaaagcgctacgagcgaaggcaagacggacgcagctgccaatagcccgacgaccctcacgaaaccggccgcttccgatactcgcctccaccgacctcctgtccttcaaccaatctctgcaaaggctcaagcagcggggaccagcggtaacgggaagacgacgccgggaagtgctggtcatggcgctttccctgacctgccgagtcccggcctaagaggtccacttatgagtaatccgggcgattcggcggacggtaaccgcgagttcaaaaagattgggtatgccgtcgccatctatccttacgctgccgagagggaagacgagtttgatgtggtcatgtgagtcctcgatctcgtcctcactgccaagccgccccgtcaacgcgcactgaaccggcccgactcggtcacagcgggacagcctttgttattctcagcaaagcaaagggatggtgggtcgtgcaaaaggactcggaaggtacgggcgatattgttatggacgacaaccagagcggttgggtacccgccggtgagtcggtgctagattctggcgagccatactacttgatattcaccatgtgctggacctctaggctgcctgttggaaacgaatcgaccgatcgggcctccatctaaccctaccgctggcgatacgggagctctcgcgaaacaacccatcccaccctcatacatcgtatcgagctcgttccagggtatcgcgctcatgcagtacgatgccaagggagatgacgagctgagtatgcggaaagacgagcagttgcgggtattgtgagttttatacgcctaggatcgagtcgtgtggctgttgacgcggttcgcccttccgatagcaaacgctacgcacattggtcatatagcgtcaaggatacgggtgaacggggttgggtcccatcgtggtttgtcggtcagtctttgacggtcatcttcgtcggtaaccatcgacgtcgtgtctgacgcggagtatctttcaaaaacaggcaagcgaagttcagagggttcatcgagcaattcgtcgggtactgcgaagccagtcgaaccaagcggcgactcgacaagacaagacgagcgagaaggttgagcaggggggggggggcgggggaaggggcggagggcacacgagtgaccacgacatcgccctatccacctcgagaccatgcccgtccttgaaaggtcgaccttcaagtgtgacgtcgtaccctcacgtagctacatggcacgtagccagctctgctcggtccatgaacagcgcgacgagatgcatcgtgcaggatttgaatacaactacattttgttatgctgtcccatctttttgccgcgggttaacagctgattgacgctggagtaacctttctgcgctaaaatcgtacggtcaaagcggaagaacagcaaccggagcaattatacgggaaggggatcataccaacgagtcaagcaagcacctagctcgcatagctcgagctcgactcgatggaattcacatgccaatatcacaattcagaccataccaccatcgaccgccgtttcatcgataaaagaaccgcacatcggtcgatcgtgtagcatcgttctgatagaagtagcgaggtcctgctcggttcaccggcgcgaatatagatagacgccttatcgggtcccccgtagtccgtgtgcctattcccggcggcggaacgaagaggaaaagactggtcgagatccggttgaagaggtcgacaaacggtgtttcgacgtctcagggaattctctcatccaacaaaccagggcgcaccttcgttcaggagacactgacgaccacggcagcaggtggaaagccagttcgagctcgtcgtaatcgtacgaaggacaccatgacggaccgtcagtaccgggagcgacaagcagctcatagggaccatcaacagctcgcccccatcgtaacaaatccggccggttctcaagccgcaacttccagcactgttgcggggactagcggtgctggacacagcggaagtgggagtggaggaggtggcggtgggggtggatcattcttctccaagttgatgggaagagccggatcgacgtcgagacaaagctcgagcgatacgatcccgttccatcgaactcggagcgacgctagcagttctcgtgggggaggaggtcctggatcttcgtcctcccactcgggatcgccggcgacgtcacctgtcattgggcctgtgggtggaagggacaagaggaagagtgctctggggtccgccgaagttatcaggggtcactacgatcgtgatggtagattggatcaggatcacggcggagctcgaggcataggatcggtacaagaacaagaggaatcgagtctccatgatcgccgacctggttcgcttctgcaagcagagatcgacgccgagcccaatatccctctcgaagagctcgttggactcgtcaggggagattctcacctttcctctgtccctggcgaggtgtctggcctagaccaggtcgaagccattagattgctggcaaggcggctggacaggactagggagcaggccaaagtcgaacaggaacttaggtcctcccttcgagaggaacgcggggtggctgaggatggagaacaggatgatgcccagacagtacagacaacctcgggatcgagggaacaggtcctggaaatttccttgcccctctgtgccgcacacgcttcacccaaaatcagaagcgccgggttcgagctacttgcggccggcctgaggcttagcggtccgactcgagacatcaacgaaccggcctcgatgtctcacacgctatggatggtcgtcaataccatcctagaccttcccgtcgctctaccgaggaatctctcgtttagagacaaccgggccaacgagctcccttccgctcaaagtctagacctcgccagtcgcttgatatgcttatcggaactcacggatcaaggaaaggacatctccatcaacctcgacatgatcaaggtgctcgtgcgatggctcaacttgctttccgccgagtgggtcaaagcctgctcagagggctcgtacggtcagagaaagaccgcgagcgaggagaagaagggggcggccgagttgtcaagcagtagcatgggactagggttaggattctccggaatccaggaggacagcgagagaaatcgctctagtcgagcaggcaaagagggtccgcagacagacgaggtgagcagtgtggatcggtttcggattaccccttctgcgattgatttttcacatgttccatttaggcctccgtcgacgtggaggcttccgaatacacgctcaaggccgtgattctgttatccgacctattgctcaacatcatgagaaacaacctggcgctctttaccccgaacgatacatcgcacatccttggcctctacctcgacacgatcaagcgcggcatcagatatacccctggctcacacccgctactcgtttcatcgttcgcaggctatggtcgtcaagaaccgactatacccgacatcaaggctaaagctggtcctgttgcgcacgagaggacctcgtccgtcttgagcagcttgagaaagcctaccaaggtcgcacctacttccgccatctctacagacacaacgaggtcatcagcagcttcgttgcctacgagcctttcgagacatccgagcacgaggagcaaaggagagaaaggattcgccacgacagcgatttctgcagcgaatgacatcctgattgatctgccagacgcgcccgaagagaaacccttctggtcgacactggtcccgtcgctcgttgatcttatcagaatgctccttaaggctcgcagtctgtctcccttggacctgcctgctatgatgtcactatttgccttgtgtctcggttggagggccatatcgacgcactcatctttcaggttggacgggggagatcgagcgctaatttcgaatgcgctcgaattgagagaccgtgatgccattatcgctctcgttagggacatcatcgtcagtaggatggttgggagaagtggagagaaggcactcagaggcgtccttggcatggatcgaggtcgtggaagggaaaagtcgacataccatgttggccgagacgatggtcttcggggaagagacagactattgggcgttatatggtatgtgacgtctccgtcatccagcagcgttcgttgatcactgacacgcgtgaccttggtgttagtctaatccgcgaactcttgaaatctacacatcacacacatacccgtgccgattcggttaccgcaccattgtctgaaaacttcaagcttgcatccttttcgccgtctttgttgtccgctatgaggttttctcactcgggtgcttcagcgcacactcaagggtttgcagatgcttggcacgatatcgatttggagatcctcggtatcgtcgacgatcaccttagaaacctggatcacgttgcatccatgcgatccaactcgctggatcagagtctcgccgatccatcgggaatctcacacggccgtgacaactcaagttcgtcttctcagcaccgggacgcttgggcagaaggcgagctggtctgccagtttctggagcgggcaaagcggtggatcttaacgacagggtgggtccggcttacaaacccctcagtgcaatcgcgtcgctcaacttctgattcatgcttatagtgacgctggctcagagtctcgcctaattctcactgcggaatcgctggctgatcaggatggcctacccgttgttgatcaccgactaatacgtcttttcatcgagctgccagttgtgttggggcggatgcagtcaacatcgtcgggtaacgggttcttccatcccgattatgttgacatcctcattcagatgtcaagtcatctgacggaggacaatgcaatggcccttctcgactattacgagcgggagggggtctgtctaccccccacagagaagtggaccggcaatatcaaccgaatcttgaacgctttttacacgccacaacccaaagatcaaatcgctgtccatggcagaggcgcttcttcaatgtcggtcaggaggcgcacagcggagcttctgttccaacatgtctatggatatgtcgcggaggacagcgctcttcggaatcagcttgttcaagaagtcctcctggatctggcagaaaggacgttgcttgtcgaatcagatcccgtcgtcgagaggatgttctggcaagtgattgtggactttgtctctaccgacagcatcgaaaaagacgagcaacggagggctcataggcttgagttggaacgagctggcgaggttgtgccagccttatctctggctgagctggtcgagggcgactctttcgatcgactccgcgtgctctcgcttcaattgttgagtcagccttgcgatcaacatggcggtagtctcaccaggaacaactcggagcggcgggaatcaactcaaaggacgcttcgcgagcgcccatctcgcccaagccaaggcaggagcgacatagaagaggaccactctcgatctaattcggccgggatcagcctcaaaggtatcatggaagctatttcccccacgagcacccatcgtgagctaccgcctatcagcagcaggacagatgctttgagtccaagaagcgaaatggaggagaccatgtcgcctcgagccgaatcgatcaacgacacaccgcccgatacctcccggcccgagacagccttccccgagaatttacaatcaagcccttgcaagcatacggcgaccgtagccactgccatcactgtctttaatcgtttggcgttctctctcccgtcgtcatctgggccagctcgactcagtcgtctgccggcatctgccagatgtatcatcatcttcaaggacctggtacggttgatggccccaccttcaaacgcctcaagtcgagaacacgccgcctctccgacatttctacggtccgaagccagccccgacgagttcaaggacgtcgttatttgccccaaggcaagactagccatcttgcaatggtccctgcgactgcgggctacccaggagcatcgtatctggatgcggcagaacctggacgctgaggcaaccagccctgcgacgtctctgagtcggatgcaatcccaggcagatgccatcaaaacgggtaagcctgtggatgaggcggatccgaagcgtcgtggagctaggcccgaaaacgtacctggcgaccgtggacgactcgaccgctctatgcaggatggtacaggacgctcccgtagtcgctctcggcagccactacgtacgacaccttacaatccactgtggaccatacctgatacgttggattttgaatgcccgaccgacgagcgtccgtctgaaggcatgacgacctttgatccaagactgacggatagcgggtttggcgatgcaagtggtccgatggggatctggctaccaatctcggagtatctctctgggctctgcgatatgctcgagcgggactccgactgggacatggtatcgtaccttttggcattcctccctttgcagctggcgaatcgccacttttactgcggaccacgagcaaaggttgaaatcaggcgcttgaggcgcattctttgcgatggcctcttcaacgatcggctcatccacaacgtgcaactaccttccatgcttcgaagagccgacatcaggggggtcgcctaccagatggtgacaattttgattagctacaagtcgctcttcgaccggtcggaatgcaatagcatcgtggaaaccctctaccgagggctgttcggaatccatcgcagtacaacgaagccgtgtgtcagagccctgaccgtcgcagcttacgagttgaccgataatctcgtgacctatcttcccggcgttcttgaacaactcagccaaatcatgggaacaccatcgatcagcttgcacatcctggaatttctgtgctccattggccagattcccgctctctacgggaacttcaccgacatacagtacaaggctgtgtttcaagtggccatgaagtacatcgagctgcatcatggtgacgagaacaaggctattgccgatgcagcccagacgcaggatcccagttacgccaccttgtcacaacacgtgctgaagttgtccttctttgtcatttacacttggtacatggctctcgcgcttccaaaacgtgtggtcatgtaccctcatatccttcggcagctcatcctgtgctttcccaagcagtttgacgagatggcagaagtctgcttcgattggctgacccgatacacctacggaaacgccgacccgaagccagctacctcgcacatcggtagcgttgcaatgcacaacactggtaaatcgccattggccgctgaaaatagccgtaccaagtattggctgctcggcaacagcgttctcagcatcactgcccatccgagatcagggtgggctacactcaacgttcggcgtgcgtctgggaatgtcggcatactttgtaagatcgagaatgtaccgacaatcacgctcggcgaagacggagcggacctcgacgtcttgcctgccatgatgcgtgcggatcgggcggatgataagccgatctaccaggatagcttacctgtttccccttctggggaaaacgacaacaaggctgtaagtcgatcttgtttcgtctctcgtcctagatttaccaattgatcatatatcgactaatttctagattctggaaccgcccatggaacaggtcatggacaacaatgtagtcgcagtcacaccttatcgcgaagccgactcccaattcgactttatctggtcgggaagcgcaccatcgcaacgccgcaaggatgtcgtgattgaccccagctttcttggcatccagctgtcagcgtatccttacatcagtgccaccactcctcgtgggcgcttcttgccgctcgattccaccgtcgagaggactttacgaaatcttgaccgtatcccggtcatcgacacccaagctatcgcagtgctatacgtcgggccaggtcagacaactgaggatgaaatactatcaaacacgagcggatcacctggtttcttgcgattcatggccggcttggggcgtctgatcaagctcaaaggtcaacgcgatatcttcacgggtgggctggatacccaggaagatagggacggcgaatatgcgtacgcctggtgggatgatctcatccaagtcatctatcacgcacctcatctcatgcccaatcctgagaccgagcccggagccaaaccgaattactttaccaagaagcgagaggtcggcaatgattacgttaagatcgttttcaacgattccggcctggattacgcatttgacacgatcaaatcgcagttccaattcatcaacattgttatttcacagcatacaccgggcttgagcggcacgttcaaggatcagacggaggacaacttctatcaggtcacagttcaaaaggcaccaggcattcccgactttgccgccatcggcgatttcaagttgatctcggtcaaagcgttaccgcttgtagtgcgacagatcgggtattatgcaaccgtcttgtcgcagctgcacttgcatacgtcgactgagggaaatctggaatacctgaccgcttggcggcagagatggcaaaaaatccagtcactgaagaattagtaagttttacaggccttgttttgcaccgctccagaagctgatgcaatgcgatcctcttcactagcctgccgaaaccgccaactgaccaagagattgacagcatgaacgacacggatcgccgagaaattttacgagagtgagcagatcacggcttcccgacttttcgacgattgctgatctgcgatgccttcttcagctttacacgaggattttgatcttatgatagtgctgtggaggaacagccattgacgacccttgttacgacccaaaaatgtacaatgcatactgtccgtaccttatgatatcgatacaccgcttgatagccattgtgtacgggcttgtccagtgctgctcatctgaagagttcatgacgaacaccgagtcgaccaaaattccagtcaaatcgcctattctgcaggtcgctgaggcgtggctcccggcttgatgggtagaaattcggtcttcaagacacgcttgcccttgtttcggggtttgggggctgtggaacagatacaaaaagctcctcgtatgagaatcatgtgtgtccagtactcgtgtgatccgacctaccattcgcgttggacgtgatgtaaaatctgcgaagggcgaggatcgcctcttctcgatagtacccgccataagcagggaatcccttttgggtaggtatcatatcgctggggatatcgccagacgataaggaaccgccgcaccggacgcgcaattgtgcgagcctgttgactcacgtgctgttgacgtccaaaacgctgccacaaccgccgaatcgctcattgccacagccgtagaagacttttccgatcccgacctgacgcaaggcgctcgcgcacattacacacggctcgactgtcacgtagagggtgacgtccgacagtggcgtgggtatccgctgggtttgaattatatggtcgagtgataccagctcggcgtgaagcgtagcctagcgggaggctgcaatgttagcgtcgatcgtggctctactgttctccgcttcactcacattgcgccactcgttcgtcctgtttctcgcttgtgctatagctttgccgtttctcacgaagacgcacccaacaggtacctctgcagcttgcaatgcctcctcggcctggaaagaaggacgaattgcagaacattgcaatcgtggcgtaggtaggtcatttgcatcgtatatgtcgaaatcatgatcatcaggaataggtcatgcgacaacacaggaagaacggaactatgctcggagtgagcccgggacctgaaacggatcggaaaggctgggatgatccgaagcgaaagctcaccatatcaagtgcgacccgcatccaagtcttgtcctcctcggattgctcctcgacgggaacgtagtacgcatcggcttgatcggacgaagtcttcttatcggacgttatcgctttctcttctcgaacctcggtaggggtcttctccttaggaagtatcttctgctcttcgatggcctccaagccctcaacaagcaattcgaaatgcccttcctgctccccaaacccgcttcggcacatgaagcttatctcagagatacctcggccgggctcgagaggttggtagttctcgtctcccctttctatccgtcgcccacgatatgtcacaccgaaatctttccaaggaatcgaatgaatcaaccccgtgtctcgctctgaggaggttgaagggtatgagaacgtgtattcgtagttgacggtcgattctcgtctaccatcgggtcgtaagggcgggataccagtcttcaacaccaaggtgtagtccagtgttcttcgcgccttgtttgcttcatccttgtcagttctagactggctcaacaagcgaagacgtaacccagaatagccagcttcaggtagcttgagcgcttcctcgaaggtgtaggcctgcgacgcgaagccagctccaccgagggtcttgaaatctacggagtgcagatagtctgctcagatgttaactggaacgacaatgatggggtttgcatacctagctctccgtagaaccgtacgctctcgggttggtcgtcccctttcccatgacgaatcggttccaagtgggatgtcgaacttccgccgcggatcctgtcatcgacggccctccatcgagtcggtgagtcgaagggagggaaaacaatcatatctctcgtaaatttcggggctgtcatcggttgaacctgccgaacgagaggacttacgtcggagcgtcatcgacatcgatctcatcaaccggtcaaacggtctaggagttcggtggttcgggtatcgcgatcaagttttgaggtgagattcttcgacaaccagtgcaagccaagcgatccttgggtttcacttgccacatgtgaagcccgaatgagctagcttaccatgattctacccgatctccctacgtcgtctctgggacttgcacactaacatgtgaaattgactttctacttcgagacggtcgagtatcgaaagcgcccgccccgcaacattatgaacccctcgcagcaggtctagcgtgaggtcaacgtttccaagtttgccagtgccacttgcctgacgccgatcgagacctgctggcgccaccacgcagtgtccttttctctggatccacacttgcactcgcaatagtcattcagcctggacgcagtggaagcgaaggtagtagccgttgccgtgaggttgccttccccaaaagatggataaaagccgagaaaaaggtcatctgtgtgtcaagtccatcatgagctgatggagttgaaggcgagagtcaagtatagactgtatctggagcttgtgggctaaacgcggagtttcgaagcgtaaataacaatcccgtttgcaggcatatgtcgcggtaccgctacagccaaagacgttgccttcgacgaatagagtgcccaagtgaattggtcctgacatatctgagtacaagcatccgagagttccagcgacacaatcctgcaaaagttgagaacccggatcccagtgatggaacccagtgcaatgaagtatgcgacttggtgatatgttcccggctccaccgcttgacgccgaagatttttcgcagtcggaatcggcaacggtttccttcgcaccgacctgataagggctcaaattttctgtctagacctcgtgcgatcggaaacgaaagagatcgtttccaaaggggccagatatcgctctctgccgagcgccttatcgtgttgactgaatcgtctagtcgataccagataccgggatggtgtactcttgctggcagcgcacgtgtccagtcggagcaggaggagctgagtcgcaaccatacacacattgccacatgatcagccatagtaaatctctccagacgtcgttgatcaccgttcatcaagtcacgacgatggactgctttctcatcaacgcatcgctttcttccgcgtccgaatcgatagtcgatatcagcgcatctgtcgagttcagtcagcaaatgtcaggagggacgatgcaaaggcgggcgcatcacgttgatggattatagaccctgtctggtgcgtccacagctgcttcagactctccatagctgcatgaaggttcggatgcttgatgatgagcagtctccgagagtggatctccccagactgatcttggtttggtttcgatgtaagcagacaggagcgatcaggaaatatcgaatcacacaagcttcttcttctgacttgtaactatatctgagggttggggtactccaggtcgacggtttcacctatgtacacgcccacacctgctctctctgcgctcgaactttcgctcattgtggctctttctaggacagaggtgccaggttaggcagcttgacgagacccggtcctgcccagatccctcgtcaacgcaccctcgcacaaggactgataatgtgggtatcatgccatatgtagggactggggtgtctcgtgctgctggaggtgccgcatatggcgggattgaaagccaggcgagaaatcgtgatctattgaaacgcgaacgcgcgcgcatgggcacgggggatgcccgaggttcgttagtatccctgcttagcccggctgcgctcaacactcctgattcgatcgacgacgatgagtctttgaagctagagcatgagggacattgtcgatacagcagcagaagttagactatggttgaacggatgagcgttcatcgagctggagatattcgcatcagtatagaatgctggcatcaccgcgagcgagtagccgagcgtgataccggtcaaatcgtacgtgcatcgacgatatgtatttctcctcaactcgcaaatcctacaaccgggtctggatgccattgttgtttgcttgacatgatgttatgatcgatccgagctgcatcgagtcgtaaaaaagcgtttctcacgagtcggagatattgctcgacacagcaagcgcgaggtcgacaagtctgagcgtgcgagtcgcgcttttatttggaaggaaagaagcatgttttccctctcgcgcgagtgtcttgtgccaggtttttgcttccgaaacctccttctccgttttgcccgttttgctcgtatccaagaccctgtacggctttggatctcgagcaatccaaaacgacgacctggaagatcttgatctctttcccttcgttcggtatcctcggtaaagtcggtcaccacacaaaagacgtcaacatgcctttcgtcaagctccagaagaactctgcctacttctccaggttccaggttaaggccaggaggagaagggagggaaagaccgactactacgccaggaagcgattggtcgcccaggccaagaacaagtacaactcgcccaagtacaggctcgttgtcaggttcaccaacaagcaggtcatcgtccagatcgtctacgccaagctccaggtgggtccccgaaagcgagacacacgacgaggtcgaggcggatcagcggggtcgttcgaattgtgcaatgcaaggatcattgaaggccttgatggatagagaccgcgggcggcggaatgcagggagagcctctgccccagtctcgtatcctggcgttgcacatggagaagacccggctggcacgccccgacgattgttgacgtcgattcggaaactgatcacgcgcccactattccttgcgatctacagggagacttcgtcttctgccacgcctcgtcggctgagctcccccgatacggagtcaagcacggtctcaccaactggaccgccgcttacgctactggtctcctctgtgctcgtcgtgccctcaagaagctcggcttggacgagaagtacgagggtatcaccgagcccgatggtgagatgaccgtcactgaggcttgtgagtctagatcgaggcggttgcgttcgtgtccaattgggatggcaagctgaccggttcccgctttctgaaacgaattgtagtggagggagacgacgagccccgacctttcaaggtcttcctcgacgtcggtctcaagaggaccaccaccggtaaccgtctcttcggtgccttgaagggtgcctcggacggtggactctacgttccccacaacgagaagaggttccccggttacgacatcgagtccaaggagttggaccccgagaccttgcaaaagtacattgtcggtggacacgtcgccgagtacatggagtccctcgaggaggaggacgacgagaggtgagtcgccgagccagagtcacacgacacgtcctgcgtgatctaactcaacttcccttgctcaggttcaagaagcagttctcgacctacttggccgacggtgtcggttccgaggacatcgaggaggtcttcaccgccgcctacgctgccatccgagaggaccccgagttcaagcccaccgagaaggacaccgccaagtgggcctccgagtccaagaagtacaagtcccccaagctcaccagggagcagagggagtccagggtcgaggagaagattgccgcctacaaggccggtcaggcttccgacgacgaggagtagattcgcgctcgtcgcgaatcgaatccttgaacaacgaatccacctcacccctacgatcctttttgtacttcgttcatgacgatcggtatatcatggtcatgttcggcattgggcggcagagttcaaagagggagctagggtttgcgcgtcgtgcgttgacaagcggtttgagcaacctaagcgcaggcaatgggttcatgtcccatttggaaatcttctcaatgagctatcctgacaggagccttttgactggcgagctgtccacgagcgtgcgcgtttctcgatctaatgtcaggggttcaaggggaccagtccgcgcagtgaaagcgactgattaattcacacagaacgggtgtttcatatgctttaccgaatcacccagccaaacgtaaacatcggcaaagaagagaggctgctactgctgctgtactgtgcctgaggcggacaagcagtgccgatcttttggaaaacgtaaattaccgttcaacaatgtgaaatatgacacgatcgccgtctccctctgtcccctgtattgccaacattttcaccaggattatgcgtgatcgagaatgatagcgctccctaagtgatgtttgcgattcatcaggagagtaccggcgagattggtcagaatatcgcatttcagaacgaagaccatcgtcgcggtcggactcctccatctcatctgccactgcgctaatgttgcttggaaatattatattgtgtgatgtcaaatgcaaacagtcagagaagaagaaatacagcctgagattgcgctacaagaagcggtaatagtacacatatcctcctggagcgatcctcgcacaccacgggcacaatgcccacgctaccccgaactggcactgcatatctctctgccggtagccttttgtcgaccgcacaactggggttcgatgagcattgcgaagaccgagcttatcaggatcgccaaggtgtccgcgctgcctattgtggccaccaagaactctcgcaacgccgattcgtcttcagcgcgacgctcctctctgatttgtaggctcataacggatggatttcgcgtgagccgagtcggacgcggcaagcctcggccccgttcgacctcttccaggatttcatgctcttcttcaccttcacgctcgtctgcagcaatgtcatcctcgtcgtcactaaagtcaaggagagcttctcgagccgagtcttcgatcctcttgcgctttctcgccttggcgagcgccgtaaacactgggtctggaagagagtgtcgacccatacggtaataggtgttaccgagctcggcacctccacacatccccatcaatacgatgaggaaaaggaccatccacggtccatagagggtaccagaatcgtccggaccgttcatgctcaagctttccctcaattgggcgagcaagatcagcacctcgactccgaccagcgcccacaacgccgtgggatcctggcgcttaccgcctggtagacggacgatggtgatggtcgagcgaccgataaaggcggcgaattggtagagagtctggtagaccggataaaacgatcgacgagccgggaaaagatcgttgaggagggccggtcgagcgtattgattcttggcgaatggtaagtagaatatgacggtcgccaagacgccctatggtatcatcgtggaaggcagcaggctgaattagcacgacgaatatcgtccggtattgccatgcttgcggctcacctgaacgttgatcagttcgaccaaaaagatggtgcagagcggcaacatgtatttcttcacgatcggcttggcgatgctcaatttcgctctcgttccaagatccttgatcatgccctccttcctggcacccggcttcttttcctctttctgagccaccttggggaacccgggcagccaaaagttgtagattgtgaggatgaccaggggcacaaagcccgtacccgagatgacggccgaaggcgaggcgccgagttgggtcaggacggtgtaggtcaatgcgcctgcgagaccagctgcacctccgcccgaggtgtacagcccgacagactgggtgatattggcgctatatttcgtggacatttggtaaaacgtactaatgatcccgtcggtcgaggaaattctttcagcaagattgtcatggaaagagagaaagtcgacaagccgggcccactcacaggtcacccaagtttgagctgcaactggcgagcgcaatcccgacgagcctgataaacaggttgccactccacgcgagcaagttcaacccgacaaacgagcataccgagcatacgccgatcctccaaggataattcacttcctcctcctcgacctctttaccctgcttgatcacgttgcgggattgtcgtttgggcacaaacctgcgcacgataggtatccttcttaacgttggtttgagaggggggacagaggcgaacgggacgaggaggcggaccatgaccgagggaagagtgtaggcggtcaggacggcggatttcggggccttgtcgccgacgagactgagggatcaagcaggagaagacggaatgtcggttaatcgttatgcatagcggaggagatgacggcagagcaacccgggagacgcactctccggcagccgcagtaacgacgctgaattgcatggctacaaagagggaacatctgcgtttcaggttgccgttcgattttggtaatgtacccccagccagacgagcacgtgctcaccgatcaacatcccgaacatgaaaaagctcgtccccaaccgcatagcttcctgcccgaccatcggttcgccctctgtacctccattcggaccgccggcgataccattagatgcgtcggccaacgatttcgccccggcgtctccttccgctccgggtcgaccgaggcctagtgaggagtggtacgagacgtctgaaccgcgacgagcgtgttgtgatcccaagaggtaggcggacgaagtgagtcgtccatgcgaaggtcgatcccggtcatcaccgagctgggtggggtagctcatcgtcgacagtgtgcgagtggatgaaagctgtgcttcaggggctcaggcgatgcacaaactagactcggtcacggatggtccgacgatttgtggttcagatccacgctcgtcctagtatcttagactcttagtggtcttggacgggtcggctggatgaggataggagtaatatgctcgtgcggtatgcagacgagtcgaggatcgatcacgggcgggatgtgaaggaaagttgtgtcggactcggccgattctctttgtttgcgtgggtcccgttcacaagaagtgatcctcgaccgcttatccctctgagcaagacggaagattgatacctcgacacgttcgtcgggctgagaaacaaaggttaccccgctatgtagctttgatcagataggggtatatagaggtaagtgaaggtgttgcgtagtgattgtttgtttgtgtttgcctcgattccccaggaccgggatgccaaccacccagccagcgtcatcggaacatttcaactcgatttgctcccgatcaccgggttcacgcgcgttcccatcgagccatttcatgtcacatcatgcatctcgcatgtatcgttcatcgttttaccacgtcaagacctcatcgaaacctatgcttgaccgcgtgttccctcttttactatcgtgtttctagctagattcccttggttcatttgcgctcgcgctctcatagagccacgcgcgttttacctcgtatattcatatcgtccccgtctcgaaacacgttcctactccttctcctccctgagacagatcgaaatctcacaggcgtccacctcggccgtcaggtcgtcgtatccccagaccatctcactcgagtagaccaagttggggttacccttggcggtcacaccttcgctctcgtccggggtccatcgcgtctcgtcgatgggtccgtcaaagaacgccttggtccactcttccttggtcgaagggttcgtcgtcgccgggggctggctcgtcaatcggggttgctccaaagaagcacgcttggccgcaggggtagctcggacccaactcaggtaagcagggttaccgggcttgacgacgttgtcggcgacgatacaggtgccctaaaaagtcaaaggttgaaagcccgggttttagctacgtcatcctcgatccgatccggcgacagcgacttacgggtccaacgagaccctcgtcctccatcatcttcaagtcgttggtgtacaagggctgccgcgcggcaatagcagtctcgtcagatcgagccccgaagaatccttcaggacgctcgatactcaccttgaggtggtcgatgaacaccaggtcaaacttgagcggggcggggaggttgagcgtctccctcaaagtcttgatggacgaggtcgagcttccctcaacaatctgaacacgatctacatgttcagcacgatcccgctcaatttccttcactgtgaacactagcacgacctcaccttgacgacatccttcaatccggcaatctcgatcgcggtcctggccgtggcggcatagacgggagacttttcgagggaaatgtacccggctcggtcctcggtcgtgtccgaggaccagttgtaagggtagatgctgtccgggtgggcctctcgcatggactatcgggatgaacatgagcgtcgtcaggacaaaagtagacagggtgtgatgtttcgctagaggacgacttactcggctgaaagtgatggcagagtaaccgacgtaagagccaacttcgagtaccaactacgtagtgattgcgtgacgacgagaagcgagtcagttctcctgcatgcgaactaccagatcctcccgcagctggtcggtgaagaaagcctgtactgaccttgggcttcctttccttgatgaccttctccacaccttcacccttggtcccaccgacgttcatcaggtaaaacttcttgccgaactcgtatagaaaatcgaggacgggttgagtccccgggttgttctgcaacgagggttcggcaaggagtgcctgttgaagggcttcttctcggccatcaccctgaaacgaggtcgacgagtcaacaagtcagtaacaggatttcatatacgtttcgagcgcgaagccgggccgagcctcggacttacgtggaagacggttccctgtacgggctctacaggaggtaacaggaacgacaagcgaaatgctttaggtgagccaacggaacggtcgacgtcgtgacacaaagtcgcagacttgccgtggtacttttgaggggggttctgcttgtcgacgggcatgattggaagatgaatgattctgtgggaatggttctggagatgaggagcagaacgttgcagcaaagagaaatgtgaggtcgtttcagcaagagcctcgagtttgacgtcgcaaagctctcgagtcccaagtcgttgccagcgaggagattgacacggaagcttggatcgggggaatcgaacacggtcgatgaggttgtcggatgcaaatatcgatgaccgagttgatgacgcgacgggatttctgccgacaacagtgacgtaagccagaagcgctagtaccaacgagaggtggcttttttccttggattcccgggagcggttccagccggcgatcagatcaggctttcatcaattctcgatcccgaactcccgaagcgagatcgagggaatcgaaccgggacgcgattgtgggggatcgaggtgacaagcggtatttcgatcgcaatagaccggacgtcgctcgtaaaatcacgtctcacttgaaagcgtgattacctggtctatccgcggaacggtcacagtcgctgcgccgcttgttgcccgagacaaagggtagaccgattgatgcggcgtggcgtttcaaggcgaaagcgcgaacatgttccagcgtaaggacgtcgattaagatcgtactgacctatgcgccagcgggttacaataccacctcttcaaagagaccgaagaccaacaccccgcccagcagcctttctgacccccatgctatcgccggaagtcgtcgatgtccgggaatgacagcttgaaaccgctgaattctcgattcccgtcgaacgaggcggcgaacgaggtgcaatacgcctttacggctggccaagcgaaacgcgtttttgttgtatagatcttgaatggcagtcgtacaggtcactcatcagctatgcagagggtggcacgatccctggctatcaatcccctttgacaaacctggtccactttttatgcgagaaagctgcaaagcgatctactacggcaccaaatctggatgggatggggtatacaagtttgggaggtttcgctgcagggacagcaagaaccaggacgcctcccgtgattgccctctcccactcttctccacaaattgaagccattcattgcttatacccaggtgaatcaggacctcgagacactggaatggggatggtctggttcgagaagaaccaggtcaatgttcgcacgagtctgagcattgaccaaccctactctcggggtttcgtgtagttggagctgaaacatgcaaatttactgtcctatcccgacaggtcgggctatttgacttggcaaatggaagaagtcacgaactaggcccggctactcgggttgaggtggtcgccgccatcgacgcgtatgttcccgaaacgaatgatggtgatggtgatttgagctgacccgcggggctgacaatactgggcttcagcttctgtgttgggacgcgtacagatcgagaccctcctccttcctgtatctatcaggtcgtgcttgaattgtcggatctgcccaagggagatagatactcccgttttcacactacggcgagtcacgacgagatgcgagcgataggcagcgggatgggtaggtctcttacgccaacataggacttgatgtcaatttacgtattcatttctcgggaacgagcggaacagggtatcgtctcagacgtatagtgtggaaggaggagggggttggtttgctatggaaagtcacggaaagggacggagatttacacagggcctcaatacaggaatccatcgtctgtcatttgggtgacctgcctggcggacaaacgaggtcgagctgtaagattaagttcaatgtcgggaagagtggtgctaaggtcccattggcacccacctgacgggattgatacagtcgagaggccggaatttaccagctgctctttccttgcaaccacttgttcagcatgctaaataacgggcggtcgcggtcagcctggatcgatgctagatatcaacagacaactattctcactcgtcaaggtaggagaccttctggccttcaggaccgtactgggcgccttgggcagcatactagagcaatcggagatgtgaaatgtcagtcgtgaattcaagaccgatccgacctatggtttgggtacataccatgccgggctaaaagaggcgaaatgaacacggatgatcattagaagatttctctagtccatgtgatcaaatgcagactcaccatccatccgttgtattgacccaaggccgagatgatgttaccgtcggggttaccgcccatcttgtcaaccaggatctccgctcccttgtgaatgttgtaccaaggttccttgcagtcaccgctggcgttgtcacctgatgggggtcgagatttgttgatcagaaccgatgaatctggttcatccgacaggctgaggacaagatctagactcacatgcgttaccagcgacctgcatgagaccctgttctccacgggcaccgacagcgttggggttgcatccagactcttgcataccgatcgacatcagcagagcggtaggcactatacagatgagtaaagcggatcaatcggcagatcctatcgagctgaatcggatccggttcggggctcactgttcttggaggcggcagcgtcggcaaagatatcctggtactgcaaacaagcaccaaagatttcggggtgggtcgaggggtcagagatggcgatcaagtccttggccctgacggagggagggttccatccgccggagctgtcgagaccgcagttaagccaccagagagcaccgttggggtggtcggccgaaggctggttgtcaccgcaactacgaaagggatgtcatcgtcattgtcagcatctaaacctcccagcttagactcctctcgaccgctgtatcgactcacgggccgctggcgtagaggaagccagagttggcaggaggggcctgagtagcggtagcgaccggggtcgatgaagaggtagaggtaggctggctccaagtagaccaagtggaagaggactggggttggtcccattcccctccccaaggagcactggaactcgaagaggcagcagcggtcgaaaccggctggagaaccgcagcaacaacggtaggggtagaggcagccgcagacgaagcagcagcagacgaggcagcagcgctggtagaggactaggtggtgaagactcggttgagcatcgctcacgacatgctttggcaaccaggaattgaactcacagcagttgacgaggtgctagcagccgagctggaagccgaagcagtgggagccgagccgacatccttgaccttgcagatcttaccacccctcttcttgtactttcgggatgtcttgccggtcctcttgctgatgataccctcgggaattccgttgacggtaacctccctggcttgacgctcggcgatgatggccttgtggtttcgtcgatcgaacttgccgtggggggaagccgcagagaccatcgagatcccgaccagggtggtcaaggcgagagaaatgagtccggtggaacgcatgttgtatcggttcgttcgaatagggatataaggagtgggctgtggtaatgtcaattcgatgtttgtgtgtgtcgaaacgaacgtagagcgaaaaggccaatcctcgatcaacgagtctgaacgtatagcacaacgagagcgaaatgaagatggtggcgatgcgaaactcacaaagaagagatcgacctgttctgtgttaactgatgtgccggattcttaagctgatcgaatcgaacggacagacggtgaggttgcgggattgcgagaagaaaggtcaaggcgagagacgagacagtgatcgacaggttgattgcgagttggaaaggagagataatccgtcaacggtacactaagatgagccttgatcctttatgtgctgattgttgatatacgtacggatgtgtggagattgctctgatcaaagagttgctataacgatggtatgagtctaaaagaaggtgaaggtcgaggtcgaatagacgtcgataggttgttgtttgttgttcgttgatctgctccttgccagaaagaattgatgggacgagacggggaaaggtaggtcaaagtgaagtgatggaagatttggatatggatggatggatggatttgtttgtttgtttgatccgtgtgcgaactcctcggttttgatgtccaaagagcaaaggagggttctcggattcaaggggatgacgagagaataggccgaaaggagggtggctaccagagctgtagagccaagcgaggttgagagattacacagcacaaagagctagcgtgggtgcgtttcaagttttcgagaacaacaaatgacctggcggggtagcgtgtgacctttgtcctttttgttgatggatgatctagtatcgacgcgaaaaagagcggaatggtaccaggctgatagaatggatgtcaggcaaagagaaggctgtattgttagagaagcaactacgcaagtgtaaatatgtacatgttcatatgtctgctcatcgacgtctttgaaagaccatccaagctggacgtttaaggattggccgtgggacaagggagatggctgtgcgtcgcgcgccctttaaacttggcacctcaaaaggtctcacaaggcccaacgtcaagcacaagtcgcgtcgcgccacgtttgtcactcctcttaatccgcggctcaaaggccagcgagacgcgagacgcgagatggtgccgaagtaaacaaacgaattagagaggaaaatcatcaagtcgagatgacgcaccggatggactagctgtgctggcgtgagaaccagtggaccggcaggatcagacgagaatagacaggttgagaacacctcgaacaagtaaccagtcgtagtgcacaatcgtatagctgtcgttgttggacatgaaaacggcctttccaacgtgacgtggggaacaggataagagaccgctggcgaccgctggatcgttctttgtttgtctgcccagggctcggggattgccaaggacacataacccaagaccaagaacaaagtttgaggcccgggactaaaagacctgccagatgccagccacgctggggatgatcgacaacttttctcgtgtgtaccgcggatcagaagcttttctcggaccgtgccagcctcgctcgtctaaaccagcttaccggcttcggacatgatgcaagttgtgttcggggtggcgtctccgcgttaattgcaattagagggaaacgatgggggattcccatgacgtcgatggtcggagttgtcaataagtgggaattgggaatttgcgcctttctagctcgggtcgggtagacaacacgtcctggataagcgatcggtgatcgctgatcacaaaaccttacgaacgctcgggaatccctgttgaatcctccccaacaagttacggctcgatcggagttcagtagacaggggtttctcgatcgctcaacgggaggaatcgtgatctgcgagtgagaaaaaagcggcaatggccgtgagatgtacaggccgagatcgacgatcaaggtggatcgttgcttccgcggaatgtttatcgcccgccgctggcagcagtatgggtgtgggaaaagcgcaaagatcgagcgagattccggctttcgctgcgatcaactggtcccgcactgacccaggcgatgctcgatgcttgcgctgacaggcaagagacgccggttcaacaaaccgccacgtttcgctcgttcagtcttgctctgtcatgacggacgcccagaattcgccatgggcctccaggaactatcgagcatagttgtgtgagtccgcgtctctcccctttcgtggggggggaaacctgctatgcggtcgggtgtacgtgtgtgcgtaagggaagatgtgtccatcggaatcaaaggcgttgagcaacgttccacgtccccccacgaaccgtgcgagcgaacccccggagacggagagacccgtcccaccgtctcgtcatcgattctcgatgattgctagatcgggcgatctcgacgatcggatcatggcggtactactcgaccaaggtcaccaaaggcttagcgccgtatccaggcgagcgtctcttcatcgtcgggtatcgtccgtccccttggtttgtgatcagtgtctctctacgctgctcgctgtggcccgcccgggcgggggaagcattctcgttccgctgccatcgggtcatgtagagggggaaaggggtgccacggcagcgcgatcaaggggtgacagaggacgagcgatagatcgtaggcctctcaccctttgctctcgtcagcgggggacgtctgaatcgatcgggtggtaggatgctgcggcagcgcacaggtggggggtttgtagggctcgacccggagcgtacatataccacatagcatggacacgttcattcagccctcgacttccatctcccttctcgcctctttctcctccaacgaaatcatcttcaacaccacgagcctctttcatcttcaacacttgatccctatttatcaccctctgaactcaacttcaccgcacacactttcttcataatgtcttccgatatgtctggcaacgtcgtcaagacccccaccggtctcaaggtgaacggtagcgagaagctcgactacaacttccactacgtctcccccgtcttcgacgttagccacgccaagctcgccgagacttacaagccatggggccgtgtcctcattgtcctcgacaagagtaagtgtccccagggtgatcgctgtcgcagcatatgctcgcgtccacgtttcgaggctcgtctgacatcgtcctcatcgcttcctcatagtcgtcgctggcatctaccagaagcccatcgaggagtacttcgcccactacaaggtccctgccaccttcaagctcatcaacggtggagagctcaacaagaacatggacgtgagtggcgcttgcgacttctttcgacttttccggaaaatgcgtgctcattctcgtccatgacgacccgtccctgcagacctttgccgagatcgtcgacttcctcgacgcttccggacttgttcgacaggagcccctcctcgtcgtcggaggtggtcttgtcaccgacgtcgctggttacgtctgtgccagttacaggcgatcgactcccttcatccgagtgcctacgacccttatcggactgatcgacgcttccgtctcgatcaaggtcggtctcaaccacaagaagcttaagaaccgtctcggtgagtggcccgtcgcgctgtcacttcggtcaacgaccaagtggattccagcgtgtacctgaaatcgctgacgtaatatattctccgcgcgcttttgcttccgcttcgtcgccctcaggtgcctactttgcccctatcgacacttacctcgacttctctttcttgaagaccttgcccgagggtcaggtccgaaacggaaccgccgagctcatcaagatctcgaccgtctctgagaagagggtctgggacctcttggtcaagcacggaaaggagctcgtcgagaccggatacggtttcaagaacgacgacaagaagctgcgagacgtcggtgatgacatctgcaagagcggaatcgaagagatgctcaggctcgagtctggcaacttgcacgagttgatgctcgaccgtgttatcgccttcggtcactcttggtcccccacctgcgagttgggtacctcgccccttcctctgagtgagtgttccgcttcgtcgtttctctgtcagagcatcgtctgatggccatcttgcgaccatagggcacggacacgccatcatgatcgacatggcctactccatcactctcgcccactcccgaggcatgctcaccgacgctatgcgcgacgagtggttcaccttggccacccaggtcggactcagcatcgaccaccctcagttcgacgccaagttgttgcagttgtccacccgagccatcgagaaggtcagtcgtcgatgcttgcttagccgcttgtcgcgacatgtattgactttgctcctcgcttctaatagacccgaaacggaaagcagaggctcgctgttcccgatggcgagttcggaaagtgcactttcttgaatgacgtctcggacgaggagctcgccaaggtcctcgagactcacaagaagtttgtcgccgacaagttccccggctacgagggacgagacgcctacgtcgactctgggtgagtttaccagagcccgcttcgatattcagctgtatagttgctgaccattcccccccacaccgccctacagtgacttgggtgaggatgtcgacgagtacatcagggacaagaagaacggcggagaggctctctctggtggatgcgaccactcgcacgccagcaacggtaccgctccttcgctcaagaaggtcgagggccaggccgccaaggccgccgtcgctgccggtgccgctgtcaactcgaagggcgagatcgtcaacggtcaggacggaaccgcctaagcgtcgtcttcggtccgaattcttccgtctcccgtctcttcactacttctggatctctgaaatcaaaccgtacacgaataacgacccgcgccggaaagaaagtcttgcaacgatctctctcgccgggaaatggactgtgtaacactacccaatcagggaaaagaaaaggaagtgcgctgcaaacacaaaaaaggagcatctctcgcacggggccggctgcggtcgttcctcgtcgaaaaagggctctatgttggtgttctctagggtttatcttcttctatcatgacaatgtaaatgggtaatgcatcgagcatacaatgaaattctactctgccgcgatacgttacgttccgagatgcaagatactcgtcgctcctcttgcatgtcgacattccggttcacacttcgtctctcgcgacgtggtaaacattttggatgccgggtagccgtggacgtggctcgagaccagagactcagccagcgtcgagattcgagtagaaggatcatcgcacttgcatcgacttgtccagcctaaaccaccttgaccggccgtggctcgattggcgtcctcgcttctagtccaccctgaagatcggggccaaggttgaatcgagctttcccccagtatcgagtgacgtaagcgacaacgtcacgtcatcatcatcggcaaaaggggtggctttgagcggaagctatcggtcggtgttggtctggttcgatgggaatctcgttccaaacgatatcgacgtcggggaatcctagcaagtctatctttgctaaagacgtcaatgttcagacacatcgctcagatctagctcgaattgtcgttcatcggatttaaatgcactcgcgaaacgatgagaaagactccttcagacgctcaggactttgcatcgagcgtcctgctctcgctgctctcacttgcactcttgccagtctccttatcagctgtcgcaggatgtatccttaaggacctctttgccggcgaagacgagtcggtcagggtgctcaccaaacgtgcgagtgagaggaagagtaaaggaacagtcatgatcagtggaggcaagatgaccaaaagtctgacgtgagtgcggaatgtctagactggcggccgagaaacctcgcaaggaatgaacgctcaactcggtcttgcccgacatagtctcgctcgagctttcaagcgtgcaggctggaaagtcatcggggtcgaagaagctgggtgagtaccgtctcccatccatggaccatttgtatcgtgcttgtccgctgaccttgcgcttgccttgtagatggggtgaatactgcccaatgaaatactcgtccgcggtcgattcgttccacctcctgccctcagcatcgacccaatacacggaatactccaactcgctcatctctctcgccattgagcatcacgtcgacctctttttacccgtctgcggcgtggcttccgaggtggaggatgcaaaggccgccgagatcatggcggtcaagacgggtgggcgatgcaagacattcatccaggaccccgagaccatctcccagcttcacgacaaggacgagttcatcaacctcgtcgattcgctcggtttccctgtgcctcatggcaggctcgtctattccgtggatgaggccatggatttcctctactccgaggcaaaggacgagcacggcaggggtgtaggattcatcatcaaatgtaccgagctcgacgagaacagaggagatctcacgacctatcctttcgccggggatgacatcaagatgagcaagacgaggaagcactttgacgggctcaagttgaaaatgagccgaaagtatccctatgtcttgcaggaatacattccaggtcaaggtaagtcgacgagcagattggggtatcgtcactcgctcgaagacggtgctgatccaggcagatttgacttcttagaatggtgcacacacgcgtcggtcgtggacggacagatcactgccttcgttacggcaccgagcaacgatatgctcatgacatatgaagactggaccaaccgagagattgggaaacgagccgaacagtggacccgtgatttcctgaaaagactgggcaagaaccccatgtcgagcggcaagaagcgtcgtctcaccggtcacttttcgttcgactttatcctgtccgagaggaacggtgaaatgtaccctatcgagtgtaacccccgggtgcataccgccatcatcctcttgcccctttcaaagctcgcctcggtctatccggcgccccacgagacctttcacgtcgagaaagtgttgaaaccccttcccggtaccgccccccggtcctggatctacaatgatctcatcatgcggtacttgccttacgccttgccctttacggagatcctggacatgatacacccttcgcttccggcctgtcacctgacttgggaccagaagaagagggtcttaccgcaagaaggcgtcttgcaggtccgggtagacccaaccttgatcgccgacgacccaatcccgttccttgttctttggcacgtcttttggccgtacttgctggtgacccgttggtggcaagggaaaaagtggaccagagtgagaataccggcttgaaagtggtgatggaattgacactgacggtctcgcctcatattgcagctcaatgttagcaccggtcggatctttgaggcttgagagctcgacgagataggatggttagggtggtagattcgcgattgggtgaggaccataggttttactgcgcgaggtcaacaatgtggattgggcggatgagagcgataaagtagacgtttctaagcatgctaatagatagatacaacttgagatgacgacgagcgttccataatttctttaacgagaggcatctgcaataggattggcgtgaatggtgacctgaatgcagagacgatcagcatccagtattgcgactgatcagatcgactgggtacgcaccgactcgagcttgatctcgtgtagcggcctgttcttgggattgaccggcactttctccatcgtctccaaggtagagtccgacccgtctatcactctgagtatcgagaacgacgattcaggaagactcctctcggttgaaccagatactgaccaggacttaccgaccgaaaatggtgtatttcccatcgagcgaaggttgtttggcataagtgatgaagaactggaacattgctgtcagccccggagtgaacggtgagcatactctgcctcgctcttacctgtgatttattggtatccggaccagcgttcgcacaagccacaacccctcgagcgttaaactgtgtacgatcaagcatatcagacagaaatacgagcgagttcatagggaaatcacgcactttcagcgtcggtcgaatctcgtctgcaaacggactgccgtaaatcgattgtcccccctttccagtccctgttcatagctcaaagatagcttagcatcccgaaaaggccttttgagctgtctccttctttcagtcgactgacccgtagggtctccggtttggaccatgaaattcttgatatttctagtgcgatgacatccagcgatggccagtaagtcctggttgccaggtattcgaagaagaagatgtacaactcaccggtggaagaggcaattatcgtatgctccggaagcgcataatgccaagaagttctgctcaagcaaaccgttggctaaaccttagttgttgtccgagctgtcgaagttggttcgcggagctcacctctgctgctttaggtgctgcttcgcaaaagacttcaatctggatatgacaaggagtgtcagtctgtgttttacgcgatcgcattgctaaccgtgatggcttcctaagctgaccttgatatcgcccagggaagtgtgtagcgttaccgactggtgagcacaaacaatgttagatacggacaaccacttcgatcaaagaaaatgtaccattattgtgatggttccagatgtcaggcgtcaaagtaaaggagtcagtttcgggacaatcccgaggtagagttggtaggcaagtaatatgtttgacgacgattcagccaagtacaggtaggtaggttcaaagtggaggtcgatcgaaccagcgcggacatcaactattttcgcatgttccgccgcgcgagtacaagggcctgtgatgtgctacaaaattatgtatatacttgctactactctccacgatccgttccctgcgacatcattagcccgatcgatacatggtgcggagttggtcagataagaactcctgcgttccagatctattcggataccagatcgtcatcagtcagagtataagcctactgtgtcgtgatgatatgacccacctcatgcgcaagacccttaagatcatctcggaactcctcgctccgctctgctggcgacgtctttcttctcggtcgcgcttcatggtgcctagatttcgttgcgacttgatggtcttggaacgccctcgcagcgcgtacgtagttttgagcgtcttttgaaagtctcggacacattcctgtaccaataaagcatttgagattagcctgggtgtaaaattgtccggtggcagtcgtacttgcctccatcaggtcatcagttggccaatcatagaagattctgacccggagaagctcttgatatgcgtctacttgcagctcctcaaggggaattccgttgctatcgcctgatgcgtagaaatagtctctcaaaaactgcgaggaggcggtaagatatcagcgagtcaagcaaccgccattacagtgttaacctaccttgagccatttgagaacaacatccaattctccatcagcgagaggccgcatatccgacggtcgatctgacagcggcggaacgatcatatcctctacagcgagaatgatctctttccacaagcgcaatagcaccgcccgtagattagtggccgaaagggagccactaagtacctgaaggttatcatcaaagtaatccagtagaggaccaatcgcagtctcaatctgtacgtctgtgagtttttggctgatcttcgagtggttcctctctttgacagcggggataaggttttcagattgcgacatcgccgatcggtaggcagcctgaatcttgttgatagcttcgttggtggaagtaggcattgctcccgtcgaacctcgaaatagtctcttgagcgtttttcgcgagagacacgatcggatgaaaggcgtcatctattagccgacacgggtcagtacgcaatctggtgcatgaggtatatggtaggtctagattcttgccttatcagcgcagttgcgtaccatctcgccctcgatcaacttgagtcgcctaaaggcttttccgaagtagaactgtgcatcgtctttttcgcgctcccgacttaatcgaaggagaagccgaccacccgtatccaggggcagccagaggtctcgagccaccatctctgggaaatccttctcatcgagtttgacgtaggctcgtccagcgcggggatcgtcgtttccgtgattatgtatactagccatcagccacatccggctctcgcaactgatgtcaaagctttcttcccctggaagacccccgtgtttagcgcctcgatggaagcctagaactccactgatgactcacatcgaggatatgccgtgtctggcactaccctagtgacggcaacggtttgtcccttctcgtcgctgagcaagacttgcgttcgtaacattgcttcctccccgtaattacccgagctaaggtctgccctgatgacgcgcaagctatatagggaagaatgtcctccagcggtatgtatagagtgcccttcgacgtatcgatcgatttccaggtcccaatacagccgatcgagctcgatcattgctttctcaatgtcattcagtttcaagcatatctatcaagcgcttggtgagtacagtccgttcgcgcgtttgattcgctccacaaaccagttcgagcttacggatggcgagaagtcgaaaggcttgatgacaggcttctctcttctggcgactcgattggccatggcaagccaacccgtctcaccggcaggagcgtcaggtagctccttcacctcagcgatttcagatatgaatcgatatttgagcgcttctccgtatcgggtcacgaccagcatgacgatctggaacgtggcaagggttcagtaagacggtttgagaggatacaaatttttatggtttaactcaccagtgcgacctcggctacgaaatccgcgtggcgtcgagcatcagaccacttcagatcgttgacggcctttaccacactgtgcaacgatgtaaagacatccaataccgacgaggtgcaaccatcttcttgccgagaggtgaactgtatcgaggcatataccatattagccttctgtgaatggtgatctgaaagaggcacttacatcatcgagattgatagcctacaacaagaagcgtcagcagtaatctcaaacgccgagtaagcgcagcccaatccgagactcacattatcaacccattgtcgaacttccatgtgcattcggcgtaaccaagccataacgagcggttcgaaaagcttgttgacatcgacgcctagactcgcactgctctcgttcaggaagatcagtagcggtcggccgacaacaagcgaggctagctcaccctggcacaaaggcacgaaaaaggtcgccgagcttgttgaccgtcttgtacaattggaacacatcgtcggcttctagcgcattgttgtcaggctgactgttacccgtagccatgtgcgcttgccgtaagaggtatagatctcgtgcaaaagtaggtatctgtgcttgtagtaccagaggtagcacatcgagtcggctagaagcgtgtttgtgagtctcatgtgcacgttcgacatcttcaatacgacacatgactcactctagaatactaacggggtatcgcttgtctaacgccttagcatgcttttcaatccatttggcggtttcgaacaaagccaatccaagactatgtgcccgcatgtcccacttctgcttgtaacgctgcctggcgacttgcgtaaccaagccactgagcgcggaaattctcccctcgattctagctctaatggcgaccacccctttggcgtcaatctcctcaagatcgtccagtatgaggaggagatcacagatctcgttgatcctgtcgggaggtgcctggtcatattgatgcatcagctcgccaagaagggcgatgacgtgatcggcgaccttcgcaagcatggcaaacagcaatgccacctgacgtatccgcaagaaagtttaatttcaatcgcttcgttcttccgctgcaaaggccagcgacttacatcctgcctcagccaaagctgtttgtctgcctgctggacataatgccgaagttttgtcagagcttcggcaacacattcgactggcactccgtcctctcgtagcaaatccaccagcaagctagcatgtgcggtaagtttggttgcctttgatatccgccattgcccagcaatctcgtctagcaaagctatatggggttctgatagaatggccaaggataccatgtccgtgtccgaaagattggccatatcgtctaggtcgagatctaggcatcttcgcaagaggtccagatagtatttacggggttctgcagggatgaaagtgagattcgtgccttgtagagtggcggcatcattggcgccatctggtcgatccccgatgcggccctgcgtaaagcctagatagtatgatttccgctcctctagatccgccttttcctgttgcacccatgtctcgtagccatcgggcgatatgaagtgattcgcctcggtaaaggcagcatgtccggctgagagaaggtcgagctggatctgaatatctctgatggcattctgtcatcgatgggcgatgtcagcgaagattatctcgccagtggcggtctctacttgccttggcattggacaatcccttcagggcacggcttttgcctttgacctccgattcatcgaggatatcaaacactctcagagcagtcgtcgccatttgcatttggtcgctgggatcgtatgtcggctcctcttctgctgcgggctgaggcttcatactggctagatacccatcgagtcgttgcaaaacgtccgtgagctgcggtgcattgctagctacggtcgcccgcatgatttcgacaaattgacgaatctggtcgttcacctcagcgttgtgtcggctttcggggaggtccggtgccttcttgacggttttgaccgtgcatgtaacgaaaggaagaataaagtcctctggactacggctctctttcatcgacttaacccaatctggattgtgccagtttccccaatagattgcagatgttctccggaaggcatcgccattgtacctgtgtgtgacgcctttagtagcggtacggatgcgaggggataccggagaggggcctacttgggatcctcccctttcgccacggctcgtaaacgagactcgagccctctcaacacctctttgccgagctttggcttggacttttgattcgccatgcctacggcatccttgaaacttcccaatatactgagtgcatcactgctgcttccgccaccgtttgtccctgtggattgaggcaatgaattcctgatggaagcctgctgtcgagctatcctggcggcctgagtcgtcacgtcgcagagaacgctaaaaatgacttcaaagtgggccggtagttcgaagaccacggtctgatcaatgtacttacctgacccgagcggtgtattctctgtcgtgagataggtggctgttagtcgatttagatgttccgcagtctagggcgaccacctacatcaggtcatcgtctaagggaggcacacgagatgagcccaattgaagaagggtttgctaatctaatcagaagtatgacttaccaaaattgctagcgctcatggagagctaggttgagagctaagggaagcgttggtaccgtccctttgcttcaggtcaacctatgaactgcccgatcctgtactgcaatcctactctgcgacctctggttcgaggttgcgttggcgatgcttagtgtcgttttcctatctcgtctggtggcaacaacgtgaattggcagtcacagtactctggctaatctctgcttcgtctcgatatgagtgcccagatacggaccggacctaggtaataaaccggatcgaacacgagtgctaggtcagacgaggatacgattgtctcaacgatgccaagacgtcacttatggcggacggattctttttgcttccgaagatcatcatcgacgacattgccgagatctcagtagaacgtagaacagagcagtcattccgtgaacttgtaagttgtcatatcccaggttgataccggttgttgagctcactttaatctcatccgggcagcataccacactagcaggctgaaacttcgcggataatcatctcgcacaaggcggacgattaacccttgcgagacctgtaggagagcacggtcgtataggtaaacgagtcgggaatgtccacccgaatagtagcatggatcggcagtccatgttcagccaggctagcatgcaggcatttgccggccgtcaacagatctaccgacagcttccacgttcattccctattatcctcagcgatacgatgctttcatgaagggtcaccggcacgaccgtcgggtcgctcgattgcgtcacacgcaaacggctttgcccgcccggcaacacatcgatcttggtcaacacctgtacagaagcggacttatcggcagatgtcgactcacgaagacaagaccacacaaagcagtacggttaagcctgttcctacacctgtaaaatcctccagtgaagtggcaaaagagctcgtcacggatgacgcctcgaaggtatcggataagcagcaaagcttgacggattggaagatcatcaagcgtttagcaagcaacatctggccgaaaggagaatgggaaatcaagactcgagtagttggggctctcggcttgctagtggcgggcaaggtgggctcgcttcttcaagcctctgatcgtatcgcggccaaactcaatctcggccgaccgattttactagattctcaacgtacaagtcccatttttcttcaaggacattgtcgacgctctgaacgtggaaataactgcggatactaccgtttggatcatcgggggtaccgcaattacaggatgtgagtgacggttgcgttttgcatctgtgtgcttcagacatcgttctgagcgctccttgatccgtcatagatgctctggccagaatcttttcgaccttgttctcggaattgaggaatgccgtttttgctagcgtgtcccagagggcaattcgacaggtagcgagaaacaccttcgcccatctccttcacatggacatggggtttcatctgacgcgtcagaccggtggtctgttgcgggccatcgataggggtacaaagtaggtgcaggtcttgacgtgtcgcctcgtaaggcacacaatatagctgatttgcgggtttcgctggtcacagaggtatcagtttcttgctctcttccatcgtctttcatgtcattccgacagctttagaggtttccatggtctgcggtattctagtcagtccagattattcacagatcggactccagatcgctgaaccgaacatcatagagctggaagttcggatggaacttcgctgccgttactgctgtgacaatgctagcttacgcatggttcacgatcaaaactacagcatggcggtaagcctcgtgtaaattgccgtgtgcaggctgtgatgttgagacgagcgttcgtcccacagaacgcaattccggaagcaagcaaacgccgctgataacaagggagccactgttgccgtcgattctctcatcaactacgaggctgtcaaggtcagtcgggccgaacaatttgaagcgagcaagtgcagtcgtcgttgactttgttttggcttatagcattttaacaacgagagccatgaaatcaccaaattcgacaaaacgctgaagaattatgaagaagcctccgtcaagatctcgacgtctcttgctttcttgaactctggtcaaaactttatcttctcgtctgctctcaccatgatgatgttcttggctgcgcaaggcattgtaaaaggtatgtttcgcgcaggtactacccagctgtgccagctaagatttttgccatcgtctgcttcatttaggtacaatgacggtgggcgacttggtcctggtcaaccagctggttttccagctttctctccctctaaatttcctcggaactgtttaccgcgaactccgtcagagtctcattgacatggaagtcatgtataaccttcaatctgcccaagccaacatcaccgatcaaccagaggctcgagatcttgcttacaggggcggtgaaatccggttcgagaacgtcaacttcggatatcacccggatcgaccgatcttcaaggacatgtcgttcacgattcctgctggcaaaaaggtagcgatcgttgggccaagcggctgcgggaagtctaccgtctttaggctcctcttcagattctgggattccaagtctggcaggatcttgattgatgggcaggatatcaaagacatcaagctcgaatcccttcgtaaagcgatcggtgtcgtacctcaggatacgcccctattccactcggacatacttcacaacatccgctacggcaaccttgaagccactgaggaacaagtcgtagcggccgccaagcgcgcacaggtggaccagacgattcagaacctgcctgaaaagtatcaaaccaaggttggagagcgaggcctcatggtctctggtggagaaaagcagagaatggctgtagccaggctactgctcaagaaccctcccattttattctttgatgaggcggttagtggctctttccagcatctggcaaagggtagacacgctgagtattcgtctgacttggacagacatctgccttggatgtttacacggagactgaattgatgcgaaatatcaacgagacattgatcgatggaaccaggacaagtgttttcattgctcatcggtaagctcggcagtccgtcccccctcacatgttgagctcaagaattctctttcctctgtaatcaaacagattgcgtaccatcgcagatgcaggtcagtctatcctgttagatcacgatacagtataatcactgagacaatcatgttttcatcaacatagacctcatcatcgttttgcgtaacggacaagtcgcggaacaaggcacgcaccccgaattaatgcagatagatggcggcgtctaccaagacctgtggaacgctcaactacaagacagcatacccatcaaagcggctccggaagaggagccgatcacggcagtcaaggcatagaggacgatgaagcccgataatttgtactagagcatttacctcgcatgttgccgtccaaacgatcatcaaattgcccgcgtccgggagtctggagaaaattgtcacgtgatcgtgtaatcggcgtccggaatttctgagcgggagcgtacagtttgaggtccggctaggcgatatcttgtctagtgtcttgaactgtttcaagcacaatcttgatcttgcaggtcccgcttgaactaaaaggccgcaacaagatagaagtctgtttccaaaatggcatcgaacgtactgcccctgttctggcagctttcgtcaaatgacacaaaaacgcggctagacgcctcggaggagctggtgacagccctgcatacttttcaaaagcagtacgaggcaaagcaaggagcgtcatcgacagacgcatccactgctgagccaatggaagcatcagatgaagatgttgaagaagatgatgacgacgatgacgatgagtcaggagtcgaagtagacgaggatgacgatatggacgacaagccgaagaggactcaggagatggacgaggaagatgcggagatcgccaagctggaccgcgtcttcgagacccgaaattccgaggacgtgaggtattctatcaaacggttgatcagaggtcttgcgagttcgagggagaacagtcgttttgggtttgctgtggtgttgactgaagtaagccgcgactgcaattgcgtcaacttcggcttgaaagctcatcttgtcttcgatattcccttcagcttctggccaccatcgataccgtatctcctaaacatgtcatttctctcatcctggtcggttcgcagacgtcaaatgccatgaagggaacggaggagagggacaacctctttgctcggttgttcggcttgactgctgttgtacaatccgggatacttttccaatcgaaagctactctggaggacttcaagctatgctttggcgaactgatggctttgggagaaaagaagtcctggattcgtgaatcagcatggtggaccgttttgactggagtcaagatcttgttgaaaagcgaggtgcaatggcgagaggacgctgtcaaggccttactgcaacgaatgtacggaactaccggagagcacgatgaatccagcaagaagcatcgaggaatggagtggacccaggacaaggctgcgctcaccttgattcttcaagaagcaagacccgttagtccttgatctccatcatcttgttctcttcggatgtaaacctctgaatcgttcaatcttgcaggatctgaactggaaggtcctactcgcccccaccttcaagaacgggagcatcctttcaggccagaatttggccattcttggaaaactgctcaaggtgagttcgagagctggtcatgatctcagcttggactgccagatattgatcgactgagtccgactgcttggcaggagactaacgagtccatcgagccggcagccccatcgggcgctcccatcgcgccgactttgaccactggatcctggaaacctaaggtacatttcatctgggatatcatcctagatacttacctaggcgaggcccagaagaaggcaaacctcaaggataaagccgatttccaggagttctatcgggttactgtggatggtcagttgtcgacggcgggcctcggacggagatcgagttctgacgacaggctatgcagacaccctcttcgcacctacgtccacgcctcagcgaaagtactggggtttcgaagtcgtatcgaaagctttgccccgattgtcggaaaagatgttgcccttcattttcacgcaaaacttcatgaagtgttggatgaaccatttgtctggtgaggatcgctacttgcacaaggcggcacaacgcattgtgagtcttccagcgcccaaaagctttcctcgcgggccacatattgacaaacttatgaccccacaggcgaaacaagtgcaagatgtcacgaaaagcaattctctagtcgggttcgcgctcctctcccagttattgggcaaaaacggttcgagaaactttgacaaggtcaccaagaccaagactgtcgagaacattatgggcaacctgaacacggaaggtgtccaacaatacattgacttcttgatgaacctagttttggaaactgctgaaaccgatgagtaggtcaaatacgactttggcgcacatgtatagatcgctaacttagtactgtttatgctttaggattgacggttctagtatcgaatcaaggagagcttgggctttcgagcagcttttagccttgatccgaagtccaactctgccgaaggaggactcatgggtcatttctgtcttggagttcttgctcgtacacggtctgttcgttctggacaaggtcaacaagaagagcaagcacggggtcgtgagttttattcgtggacgttgactggtgatctggcattgacgatggcgtcacttcttttcagctgcacacccgtcctcaaccgcctatctcggaagccagtgcagccatctgtcgagcacgtttcttctctgccatcatcgaactcaccacgcaggccaaagttctcaaaggtgagtattgtcaaatcgacgcgacgtcaagctgtgctgcggaatgcttatgctcttgcaactttagaggaggatcgcgcaaccaaactgcaaggatgcgatacccaaggtcgactatggctctctcgggctctcgaaaccttgcaatatttggagaaggacaacaagcatgtttccttagctgtggatgtcgatgaggagatcgtcgcagaccgcgctaaagcatcaaaggcactgaaagccctgcgagaagtgggtagacctggtcctccagtttagtttactccaatgacattactgaccgcggtgcccgttcctcctacaggcctctgctttgtcattggacgttaagaagggtgtcgaaatcctgctatcatttggcttgctgcagacttacggagatgatgtcaaggcctacgaaagtctggaagtgagtaatttgctgggtcaatgccaaggttatattggagtgctcacgccgtatgcgctccacaggacattgtttcttgtgccaacattttgtcacaacccgcggcatcttcatctacgtcagaagctccgctaccaccccttgaccttcttgtcgatgttctcattgcataccttgacaaggcctcgagcgatctcaaatcgcttgccagtcttgttttcggactcctctcctccgaagttcaaccatccacgattgagcacttgatcgcggtgcgtagcttctcgctgaatcgaacctagtggttattctgacctcctcgtcatctgtcctaaacagcaactcgaacaaactggagatggttacgagagcgacgaagatgtcgaggacgaggaagagggcgctgaagacgatgaagacatcaacagtgattcagatgatagcgtcgtcgatgaggaggacgataacatggaggtcgacgccgagttcagacgccgggtggctgaagctctgcaggtcgccggaatgtcgggcaaaggcgcaggaaacgccgacgacgtcacggatgatgacgacgaggacgaggatgaagatgagcacgagagcgacgaagaggatgatgacgagtcggacaaggactcgatttcaatggatgatgaccagatgctggcgctggacgagaagctggcttccatcttcaaggagaggcggacgggcaagaagggccacagcgctggtgagcagatataacgaggaaacgtgatcaatcgaccaaacttaatattgctcgctgctctatagtcgaagctttgcacttcaagcaacgtgtccttgatctcgtcgagatctacctgcggaagcagcccaccaaccctcttgtcttctctttcatccctatccttctgacactctcccagagcagtgctcctgctgaaaagtcgctcgctgaaaaggccaaggccattttgcttcgacgcttcgacaagtcggcagaagtgccggtgatcgaggacgtcgaatccgccaaaaagaccttggaaacgattcacaacacggcccgaaggacctcttcgaaggaggttggcaaagcttgcagcaacgtcagcatcttcatggcgaaggccttcaaccaatctcagagcgagggggctgcggccgccgtgaccgagacctaccgagcgtctctgaaggactttttgagcaggaagaccagcaagctctcgcctacctttttccaggcttatttggagcgacagcctctttccgcctgggccttgcgggacgacattcttcgttacgctcggggcgacgcggtcaacgacttccactacttgagtgccttgaaccttttgagcgctgtagccaagcaattcagcaatgtcgtcaaagctggggaaaaggagagcgtcgaggcctacgtcgcagactgccgcaaggtgctgtacgaagcgctcgagaccaagggttcagcgactggatcatggaacgccccccgagtcaaggaagtcatcaaagcgtgcttgcagatggctcggttctctcaagtcgtctttgacaccccggaaaagctcgctcaggcgtggtcggttgaagatctccgaaacatcgatttgactttgcgtcagactgagcgactcgccaacaacgtttccgtgttcaccctgcttggacagttcttgctccttgtcgatcccaaagccaaggaggctcaggcagccaaaaagcaacaaaagcaggcggacaagaagcgcaagttgagcgaggtcgttagcgtcgacgaaagtgttgcggcgaccaagaagggcaaaaaggccgccccggccaagaagcagagtgagaccgaggagggtacaccaaagaagaagaagaaggtagccaagaaggagtagactgtgtgccgatgtcgggatgtataccaaggagcatgtcccatgtcgttgttatcttgtacggatccgatagatttgatgtagtattcttgccagggactgctgagcggacgaagatctcggccatgtgcacagcagccggggcgccatgagaagctcggcggcaatcaatcaacctttttttggcccatcgccctcggcgtggaaagggaaggggggaaaggggatggatggtatttgctacttttgtcggtattgaggaccacggggctgtgaggtcagcagcaatcgttcgagatataggcatctagacgaaagatgacgagcacagcgagcaccgccagcatgcctttgagtactttgagtagatcaacgacattcccggaaatacctcacaggcgagcactccgtaccatacacgcttcaagtcgcgaacacatcaacagtcaggtctaaagtcggcctacctttgctagactgctcatcaggttctcagctttcagtcgataaccatcttgagacaatcaatcgtattcgccgtgacgcacaatgccgagagagctccggcgagtagtcacgcatacctcctaggctccgataaacaaagtcggcaattcgagcccgcagcccagcttttaaactgttccagctctcctgcctgacttagggtaccaacgatgcgggtcaggtccgtgatccccagtgtagccatcgtatggcttaccattatctttgcgggattctggtggtaccgtgagggactggatgtgtccgaaaccaccgggcatgcccaaggccgtgttgactttgccagaggatccggtcgacatatcgcgaaccacactgcagctcgacctgttgtcacggcatacactggaccagatcccgagcaactcgttcacggtctaccaccaccggtcgtgaatccagccgacctcaagcctttatcgtctttaggtctggaagctgagtatgcgtatcaatggggaccggcaacaatgaccgaatacaggcataacctagacaaattcctcgaaaaccatttcccgatcgattctcaaccccgtctcagggaagatctcgagcgatacctgggcacatggacagtgaagcactcgaaatcactgcccgtccttggaggtacaggtgtttcgcgcgagatttacatgacggacaaggacgattcgaggatgagcacggacgatgtcagggattgggtcgaaaacaaggacgggtggggggtattcttcctggacgaccagtccagcgagacctttgtcgatcggaatttaggctcgagtcgattgaagcaggtctgggacgcgttgccgagtgggatcttggtaagcaatataccgtcgtccggtcgcaagcagagaactctgcgttgaagctgatactgttgatggaattgatcacagcactccgacatgctgaggtacatccttttatatctgaatggtgggatttacaccgacctcgacacgaagcccctgaaacccatatccgagtggggtcaagaaccagacttgtttcgacaaggccggggatggttgttcgacgaagaccgagaaggtgacccgacgatgggtgaactggaagagatgaagcgttcactgggaacggctagcgtgattgtcggtgtcgaaagtgatgtaggggatcgaaaagattggcatgactggtggccccggccagtgagttgtgatacgccctggcgagactggcatccgacctaaccgacggaaccgcgctctcagctccagatcgttcagtggacgattgcatcagcgcctcgacatccgatcttgctggacgtcttgctcgggatcactcatgcgacctctcgagcctacacctgggcacgagagcatcaccctgaattgaacgcgcctcattctgatggcgagccacggccggacatcacttctgaaccgaaagcgggcgggcccgttggcgtgatggactggacgggcccgggagtatggacagattcggtccttcgctatcttcgcgtcaagtacggggtcagatggacagatttgacgaggttggcgaggccgttgaggatcggagaggtcgtcatactgccggtcaccggattcagtccgggagtggggaattttggggcgatgagtaggaaacgtgagcaacctgcggccttatcctgataatgcctggacactgtactaatttccctcacacggtcgatggtgcagatccacaggcgatggtggagcatagattcgcggggagttggaaagctcacgaaccgcaaccggaggacgaatgatgcagattgtccgaggaaacacgttttacatggccaatttggacttttatgagcgacacaagaggatagacgactgccaaataacgaaatttctggaaaaaggcgccaggtttgccatgcggtataccccgtacgaccgaggattggaaaggaaatgaactttgtacgatcccagggatccatatgtcatcacaatttcttgacttggctgcaacctcgtgcggatgtatgtttcaggacgcaacatgcaagcaaaaggcggatcagaccaatttgcccttaaaacgtatgtcgagtctcaagcctgcgtgggctggcacttggccagtgagacgcgtgagaaccgtcgcactggcgcatatggtgtgaacgaccgagcgaccgacgggatctccgtcgtccgtttgttgatcttgtcatccgccgagtttagcgtgttgatgagactgcggtcgcgcgcgacggcccggtccgtggttccgtccttacccgtcctggactctcggtggaatgatgtcgctgcttcggaggatatcgaaacaggctagtagctagtcgactctaggagagtgaaaattagcggacggaccgggtgatgaggcgaggagatataatcaaagtggagagagacgtatgtacgttgtacagtaccagtagcaatcgcaaccctgtcttcgagcttttcccgtgtccaacatcatctcgttcgcttcgctcgaaacctgccatcgaagcctacgactctcgcgcgctaagattaccggaacggaaccccgaagctcactttcttagccgagtgtcccaaagtcccgacatacggaagggtattcatcttccaagctcgcccgatcactcgatcgattagcgactcgcaactcgacgttcttgctgacgttgtcatcgaaaggttttgcaccgaattcttgcgtgagtcgttcataaaacccggcatccatcgtctcttgaatcagcgaggtattgatcgacgctacgtcccaaacgcctcggccgacgaaatagatccgccacggttctctcaaaggactcgctctcacacgatcacacggatccaacccaccgcccattgtcgatttgatatcctcatcgacatcgacgtcgtcagctgactctacctgcacgtcaacgctagcttgctagcctttcgacccacgacgccatcgctcgctcgctcaggacctcgaatccacctggcaccccctcccctcctttgattcctccttcccaccccggccctttgaagtggagccccgtggctcgcctgccgcaggaatcgagggtcaatcgtcgagagttgatcgtcatcagatcagacgaaacgtcaaaaagagagagaagatccaaaggaacctgacttttgctttgtcgacatacggtcggtcagctgcgatcgattacccatcttcaccatcaccatctcatcttccagcgggaattgacattggtcctacgaacaactatataaaggctcgaaccgttcaacaggcataggtaggtgtgctcatccgaccggcaattcggctcaatcccccgcttatcaaacttgcatcccctcatccatcaccagccaatttcacgtcgactcgacctctagacatcacggcaatcgactcggaacagaaccgaccacgcaacatcatgatgtcctacatctctcccagctcttcggcctgcccctctcctcgggtttgcgtctccccctccccgcttgcccacaagctcaacgtcatcggatccccgctcgcactctccccacacggctctccatcgttcagagggatcgtgcaccccgtcaccccgcctcctttcaccctggcatcggacaagcctagcacgaccgtcaaacccgccggccccggagcgacgctcggacgacagtattcgacctttggaacgacctcggcttcttccggaggactgtacggctcctttgattacgagtccgagggatccaactaccctgccaagcggatgacggacgttcacgaggcgttgaaggagttgcacgagatcttgatgggggacgtcgcctcgtcagagtcttcgtccgattccgaggaagccggcgagggggctttcgagatggatgaagaggacgaggatgcaggtgacgaggcgagggacgaagtcaggactgcattcccggccccctcggtcgggattaggagcggaaggagagccagcttgttggccgagcaaaagcccagggagaagcctagcaagggttggagaaagggagtggccagggagagcgtgaggtttcagctgatggtcgacgtcccttgctgggaacccggttgctacagcggtgagtcatcatgtctgccttgtgtcgatgctacgcggctgaacaccctgcaacgcgacgtctctccagacctctcgtccatgcaagcgcttcgcgacaagacgctcaaggcgttgcacaacttgatcgactctctccacatccgggggatccgatcgacttaccgccttcactcgaccgccaacgggggcgcgtggggttgcatccgcgtcgcacccttcatgtcatcccgcttgggtccctcggcgtcgtcgtcgtaccacaaggcacccacctcgcccttgtcctcgtactcgcccgtcaccccgtcgagcttgttgttgaacgctacgaggaggacgaccatctcgggtagcttgccgacgaccggctcgggcttattggcagagggaggcaaggcggccatgctcgagaagaaagagctggacgaaaaggagagggttgcggaaaggatcaaaaaggcgctcgaagaggacggcgaggggatcgtggaagagaagtgagtttccgaacagagtgcttgtttacactagcatcacccgctgagcagaatcaccttctttactagccgcacttacttgctcgctgtcaacggtcaacccgctctcatcatgacctgatcccagcccgcttcaacaaatcgatcacctcgagatcaaactctccgccacttctcgcactgaatcgactgacaacatcaagctctcgtaaacaacaatcttcccctctctcgccaccccactcgatacgacacacatgcggatcgctcagattccgcctttcaatcacgccgctctctttttatcttgcctctcgctcaatcacgcatctcggagatgcctctctatgaccccgcttctgtttccctatttcctctgacccgttggatacctggagccataccacccgttttgtatatgaaacttgtatgtaccgaaaagcaaccggtgcggcgttctcgaccgcacaccgtctcgtgaggcagtgcacctgcggaatgtacagatagatagcttcttgtctctgatgtaccaatcgaattgtaatggcttctggtcgaccttgtgctcgcgagacgaggaaattgcttccggtcgttcaagcttcccggactagatttccctcagcctcaaacatgttatcgttacagccaggaacttctgcactattctcgttctcgcatacccacctgaacttcacactgtcaatttggagatctttttgaaatcgttacaaggaaacgtatacgttgcgtctggattctttgtcgacaaggatgtccgcgccatcgacatctaccccacagccgacagtcccctctgtctcgcaggaatcagcattcgaggaagactattttgccgagctcctccttgatgacgatgtagatgccgagctggaccttgtcgtcaagcccaagaagaaaagcagggaagagcgaatgaacgaggccgttgagatcagcaagagggattacaggttcgaacatgggataacggaaccatgggtgagcatgatttggccttgccttgatgcatgaacgatacggtccgaggctcacgagaacgtctgctttgggaccgtctcagtagtggtcaatggggctcgatcagcatccgcaccacttggaccgtgatcggaatgatacggggaatgattttgttgatgttgtcgacctcaggatggtcggtcagtcagtttgtgctggtagccctatattggctggagactgatctttgcccacgtttactacagagttgaacatttcccaattatactacctacgggatttccaacaggccttcaacctttctctccgtctcctgtgtcccagcaggttctcccgcatctccgctgctgagatcccaatggatgtcgttcggtacgacccgaagatgacattggtctgggataatgtttcgagagaggtcgcagagacaatgatgaggatcgtattacagactggtacaagacactggggaggggtcctggctgatgggacaaaacgatcggtatgtacctcgacctatgccgccccgtcttgcagcgtaggaggcgctgaatatcttcggttgattagtggactcaagggggaaacggtccagcagctcaactggcggcgcgctgttatgcggtggaagaacgataccgaggtgagttccgatcgtatactctaggggacccgtcagaagagctgaatcgccctgctatacagacgcgattgtcgcgatctcatatgccatcgtcgatcgagggttgctgagaccgtttcagaaatcgcttctagacattttgaccagctggtcaagatcattggcctccacggcgagaccagaaaaggacggtctatctggcaccgttgagactatgcgaatcgtttcggaacattgtgtacggatatcaaaaaaggcggatctacctatggtcccctccgatgacgaggtcaaacgggtaaacggggatctacccaccgaagccgacaacgtggacgatattcctgaaatcggtctcgcgccagagtttacgctgcggttctctaacgagctaggtgtagtggacgagactgagttcaaagccatggacaaagcttggaagcggataggtgggctgctagcagcccggcgtagaggagcaggtgttgacgacgaggatgacggggtacaaggtggtagaagcgtcaggactttgtagactcaggtggccggtaccatataaacactctactactagaccagaccacatgtccggaagtaaattgtcgaatctcggtcgtctccgagtcaggcccgcaagcaactttcatccattctcgaacatcttgaaccaggttcggaaatcgattgcatccactgatttgcaggatgtgctaaagtgatattctggcgaccgttggctaccagacaggctcaaaagactctgtcaccgggagctgcggtcgggtctttggccccgtcgcattttcgaccgccaaacgactgtatgtatcgttcgaactgctaccctaaggactcgcaagacagcttaccagcctgggctcagtcgccatgcctctggccttcctgtactaccgtctccgggacttgatccaggagatcgttacacgatgggagatcttggacaatatcttctcatacctcggtccgagcgacctgttgagctttctgtattccaagagcaccttccagatcgctgttaggagtatctatcgacggatctcctcctcgatcgggatgaggctaagcaatcagatccgaccgttcacagtgagtgcgcgagtgatcctcccttagcgtctaccgagcctaactccatagcggactcacaatataggtacgaatcctcgcctaccaaggggctgtccaaatcatcgaggacagcaagatcgggagggcgaacagacgggtagatcagctgctctcgaatgtcgcgagagacccacaacttttcccaaagctgcgatacatcacctctaacaaggtccccggcaaaaagagccaacagatctacgaggcggtactccaagtcgggtcgggcggcatccaggttatcgagcttgacggcccgggccgcactttcgaagcccgtctcaagcagatctcacggcacatccaatcccctcgttatggccatcccaagacgacgctcgttggggagatcaaacagtctcatttcggattcctggtttggcagccgttcgagtgcatgctggagatcgagagtcccaagaacctctcggactatctgcatgacgagaatctcaagaaacacgccgagacggtccagcgacttcgtctcgagcgatacgatgtctcgatgcgaaacctcggtcaggtgctcggaatctactcgaaagtgaccgaactgggcttctctttgccatcagatggaagcgttgacgctttagtcaactggctgaggcccttcgctccggtactgcgcgtcctttggatcaactctaccctcaacacgacgctcgatgggatgctcgatacgctcaaacttcctctcctggaattcatgcacataagactgtccagtgaggggtttaccagctcgaccactcatcaggcgtgggcggccccttctctacgggagatattggtccaggtggacgcagggtttcacaaggtggtcaagccttttcgcatggcgcgctggatctctcaacgcatccctccgggttgcaacctccgcatattgcaagactcgaggaggaaatcggatggtccagacagagaatgggatcgtggtcacgaactatgggcttgcgaagtaaaagcatatcgaacggagcgactagaacgggaatggcaccgcactcctagaggcttcactctcgtctcagctcttgccggatgaatcgccggaagcaagctgaatcgatagtcgacattttggaatcgcccgcactagagtacatcctcagcagccaaccgaatgatcgtcattcgctgccaggatctaaaccatggattagcaattctgtcctcgagtagaatccagtgtggccatgatcaaaagcatattgttgctttccatataataccatgtctcgctctggtgcaaaaaagcgcgcaatgaacctccattttctcgatcaagcgcgatcctacgtcatgcaatgatgggaaggagagctggtaccggtcgatgggcagattcgcttcctgtcggtttttggacaaaaaaggatactgcaactatcatacgatcaactgaccattagaatcgcttctgaaactcacgctactattctataatcaccaaggcctcttttctaaggatgcctaaacccaacaagtcatcagcttcgtcgggcacgcgaaagaagcaggccgcgaaaaaggcagacaagaccggtggacctcccggtgcgagtagcagcaataattccggtgtcaagcagcagcgaggacagaagaagctgtcaaaagctgaaaagaaggctctcaaggatgctcccaagcaaaaggtctttgtgcctccacccaagccgccagcgcctgccattccagacccattggatgcgcaagggctcgcgaggaccttgccggccgaactcgtcgtggtgttgaggaggctagggaagaaggatagtgtgacacggagaaagggcatggaagagttaaaggagatttgggtggatccggtcgttggcagggcgaagctgaataagccagtcgacgacgtggatgtcgatatcgcggctgagagtatggaggatgctctgttggaagctttgccggtctgggtgagttcgagtgaaccctgcgagaatcagtcgagatcttgtcaatctgattattgtcgtatgtcgtaaccaatagcttcacaacttgcctagtctgctgctctcaccaggtcaccgagggctagccctctcaatacacacttccatgctgtctgtagactcgattgcagcatcgcttcggaataccctctcgctggggttgttcacaggggaacatcagtgcagggacgtcatttctacttggttgacagcgtgtgtcgaggagagcggacgccgaaatgctggcctagctgcaggcagtcccgattcggctttagggaaattcgaggatttcatcacatgggatagcgagccggacgcacccgaagtcgcacaagaggacaaggagggaaagctcgccatggcggaacagctgggtctgttggttgaatacttggagatggccatcctgagcccgcacgatttgcacgacgaagtgcatcccgctcccaaggcctcagtcacagagccatcctcgggcgcggcgacgcccaaaaaggggaacaagggagcggctacgccaatgaacttccctactctcgcgtcattgggtccaagcaaggtagacgaggagtctgctgccgaggcggaatctcagaggatcgagcgggtctctaggtacaaccttagcggtgtcctcggacttacatatgtgctaggcaaattgcccagctctatcgcgtggcccgagaggttgaacacactgctcgcctcatcgggtctttgggacatgatgcgtcctaccgtaccgaagcaccaggtggtcgcatgccctcctgttcggagggcactctatggcctgctgtccgtcttgatttcccgattcgccggagtgtttgaggaacagttattacctgtcgtcggccctgccgttctgactagtgtgtggagagagacggatggtagtgtctggggaggcaccaccctgagcgaggccttgacgacattgttgaccaggttccgaggggtttggacgacagagccactagcagcaacgcaagcttctgagctgccagagcagctcgaggaagatgttgattcggacgacgaatcagacgacgaagacgatgaagaggacgcgaatgatgaactccaggagaccgacggcgaatctgcagagaaacctgccgaagctcctgtcgagcaggtacactacaagctgggtcagcaagcgtacaaccagttcctggtctaccttcagcggggttgcaatgggtgcccgagcgaaggttacccgaccgtactggtggtgttgtctacgttgccttccgaggtaagccgatgcatacatgcgcggatctatgacagcctccgccgaccttgacgtatcgtatattcgctcttctagattctcgcgttgtcgcctgacgcatacagaacgctgttcacgtcgctttgggccgcttcggacgccaagctcctctcctccacgccatctggatcaggaccttccccaatgttccaattcttgaccgcaactatcgattgcgtcgtcttcctctcacttagagcctggcggaacgctaaggacgctgacaaagaagagtttttgtccattacgaccgatgaggttactcgaatctgggtagatggcgtcttgcctgagaccggcaaattgacccggatggataggtcgatgttcgctgagcaaaggctcgagtcgactagagaagccgccgcgctatcgaaagggctgtcaaggcttgcacaggaggcatcaggtgagcaacgctgggtcgtcgatgtgtcaagcacggctaacgactgctttgggacgacgcagcactcagcgccgagggtattgacaaaatctgtgaaggaacacgcgcagcatacaaccgccctgcgtctgacgagcaggacaaatcgcgaagtatcttgataccccgatttaccgtgctttgcgaggcgttgagatcgaactatcaagcggatgacgcgatgactcgatcgctcgacaatttgacccctcaggtgtatcgatatgccatcgaggcatccgccgatcccgctcgcgacaagactgctcgagaagattatctcaaactcgtcgtccgactcttatcttccagtggccagcttctactcgaagacgcggattcgcgatcggtgaggttccacgtcgctacttagcgttatcaagctgattagtcgatccctacttagcaaacggccaccgtaatggactcgtgcttgccagaaatgcttgtgaatttggacgacaacctgaccgggcctctttgtcgcgactatgtgatgtggttgccgactccagatgcaaagtcgttggcctggaggaccatttcgcatgtggtagactcgctaccagcttcaagaaaattcgacatcgcccgagcgctacttgtgacctggagaaacacagacgccacgccgacagcagacggtacgacctggggtcacattgtcatggaagctgccgaacacgcgggtgacaagaaagaacgaagcacatcagccgaacagctgatatctgccgtgattcttcattctggtatgtcgaggtgcacgagcccacgagctataattgatatgagctataattgatataaaaatccccttctacaatctcagatgacgtgattgacaaggacactcgagacggcctcttgcttttgaccacgacgtcaatctcgtcatcaatcgcccacatgctcgaagtcggaggaagcgatgccgtctcaacagccagtcttcagaaccagctcgatgctgtacaagtcctcgcgaacaggcgggccaatgcttttcaagaattagagctttatcagaatgcgatcatctcgattctggagatggtgtcatttgcccagcttatggaccctcgtcccagcgatggactcctccaggccgctggctctatcttgaagagcctagagtctctcacttcctcggataaattccaaagacgcgctagtacccatcttaatgatctcttggacgatctatctgtgcacctggagtaagccgagggtatcttcagcttgcatatcaggtttaccgccacttaacaagacttgctctgctgacagtccatccgcgatgatcgcttgtctctcatcgaaaaaggagactcgcggtatcgtgcctcgcgcgcacgacttatgcgccgcttcgcaaaagtacatgagcgagctattgcagcgctccgtaactgccagcgcatccatcgtctttgacgacttgctgccatatcgcacgcctgagccggctcacggccagaatctccacgactggcgagggagatcggtatacgcgcgtagactcgaagctatcgtagcccttttacgatccgatcgctcgcagacgcgagagtcggttgttgtgatgcatcacttgctggtcgccgatcgtttgcttcgggacctcgtcgattgtggaggtgccgattgcggcatgtttacggcgtccgtttcgcagctatacgtgggcagtctcggcgccgagaccagtaacctagtgtcttatgctgtcaattccctcgccgccgacatcacgtcgcagtggcacgtcaacactatgatgtcggtcaccagaggcgagcaggtgagcaaagaaccgtcacttcttgaggacctctttttgcgggtcgcattgtcggccgaattggacctcctgtctccaagaatactccgcttccttttgtcgcgcgtcttgtccctttcgggtgatacccaaatcacggaacgttggctggcttgcggacagaacatcgaagacaaaagtcagtactggcagatcagatccgagtgacatcgttgactgaccaaagtctacgatggcagagccaatgacgacacgtgtcatcttgcaggccgttgttccccagttggagaagtccccacgattggatcgggtccgaaacgacatcgccagccgcttgacggctattccggttgcgaaagctggttcaactggcctccggctgctatctaatctcttggcatcgtcgccaagtatggactcggaagatgcattcttgcctgaacagcgatccatctttgtcatgcaacacttgacccaatggttaaccagcgatgatgaagctgttgatgacctgccagaagaggtcgaggccaggatttgtttgcttttcgcggagcttgcgccgatcgtgcaagcgcgccctggcgcccattggaattcaatcttcgacatgatcgctaacaatctagaggtatgtgcccgtaccttctccgacccgctccagcaattttcggctgatcgatccatcggaatagtcttgttcattgtccgacgaatctaccaataatctggcgtttgcgaccttgaccttgttggaaaaggttctggagctcagccttacaaacaaggcattagctgctgattggacagacatgaatgaacacattcgtctcctggtccaatacctctgttccgtcaacgttaacgatcacagcaaagatgcggtgcgagaccacctgatatcaaagtcgtgtggtatgatcgctctattgggcgatacactccctgagttcccggacacttccaaagtgagcgcataccgtgtatcatgctgcgtcatatctgatgcgatgtcttctccaacagctttaccccctgctggggtacgagaaccttggcgtacagcaggttgcgcatcaactttgccatatttacatcgtgaagcacacggcagagttggtcatcgaaatggagactgccattgacgcagaagattcgagcaaaaccccgattctacctgcactattattggacaatatcatgacatccgctgaagaagagcgagtaagcatacttttcaccagaccatgtgcaacatacttggtattgattttcattctgtcacgaccttcatcctgccacaacagatctccttcggagctcttctctcgtggatgttggttttcgatcatttccgtgatgcggtatgcgctaccgtctcctctccgccctgcctacactaacaaacacccgtacacagtctgcgtcgttacgctctgtctacagtgatcagctccgcgaacgcgaggtcgtaccaggcgctctgatgatacatatgcccgacatactgcgtcaggcgtgcagcggcatcaaaccagccgactctgtatactttgcggttgacgaatttcacttggaaggtcagtattgtgatgaactgctgcgtctgagactcttgttctgatttggcaatgatgtcatctcgcgcagctttgcagacagtgacagagcaagtgtcgatcgccctgtcaacccacgtcttttatagggctctggagaacgtacctcaattggtcaggaattggtacgaggcctgcaaagatcgtcaattggccatgtccttcatcagcgtcgtcacacgccacctgtcgccagtgcttatcgagcacgagtttgccgtcattcgccagcctggagttctcaaggcacttgagaacgatagtctgagcgtgcgagtgttgtccgcctcggccgaaatcacggcgaaatacatcatcgatgaacagccgatggaaatcgccatcaaactcccgcaagattacccacttcgtaacgtcgaagtcaaagaggtcaaccgagtcggagtgaccgaagggaagtggagaggctggatgctcaatgtgcagcaattggttatgagtcgcgtaagcactgctgcgaccacgttccgctcttggctgcatatgctgacaatcgagcttgggaggtcctctcagaatgggttgctcctcgaagctttgaagctcttcaagacgaacgtctcgctgcacttcgaaggcaagacggaatgttctatcgtgagttggatcggaagaattctccgttttttcgtgggcttatttacatgcatggtgccacaaatctgcagtgttactcgtaagcgaaatccagtcggatcttgtttgggactgatagctaaccgtgatcgaaaactttcagcatcatttccatgaatgatcgctccctccctagccgggcctgtcctacctgcaagaacaagtaccacgccaattgcctcttcacctggttcaagtcctcaaacagttcgacatgtcctatgtgtcgaagcctcttctgaacgcgccactgcgtttactcgcccgtcaactgtatcctatatagcacggtcttgcccacaagcaagaacactaccacatataatgaccgcccgttatgaaatgaacgtgtctcatagtcatggactttcgcacttggtccgttacaacgttggtaatatagtaagcaggctctccggtgattatgtatgtgtatgcgctctttcaacgtggctgcagtcctgttctaaaccacgctggcgagtcccggatatcctggcggcatgggaaaagcgaggctcagtcttttggtctcggactgggtcgccctgacagcttgtgtcggcgtcgtgtcggcatcgagatcctgttccatcatcgggaagatgagagacgcgcgcgatggggttgcaggtaccgcatgcacaggactggacaggatggtgcgaatgcgcacatcgttgtcggcaaccgtagaggcttcggttgcctcagagagcaaggtggatgatgcgctcgcccggtgactgtgtcgttggtgccgaggtttgtccgtcaaatgggacattcttcgacccgaaagataccgactagtagagttccctatcaaattggagcagtgcgaacacgctgaaggatccgtctgaactccgacggaaattcgctcacttccggcccggatcgtcgtaacagtcatgttggctggatcttcctcctcaatgacttcgctcagcagagggaaagccttctccatcggtgaccgaagggtcggcgtttccggtgcggaagacctgccttggtcgtcctcgatcgaggccgaggtctgcgaagtctcaaaagcgggagtcgacgacctgctcagagtgggtactgcgggcgaaggaccattcactatgctagcgaaatggtccgcctcttcgggtcgcagtacgccagaagtgttttgcaggagcctgcgccagtcaccgctggtgcgtctgctttgccaccgggacccaggtgcatcgagggattctccctcgtgaggcgacctaagtgattttcgcagactcgcctgagatgtctcagattggcgccgagactctacaggggggaattggtaggcgtcgcccgtgtcaagcttttgcgaggctgtgacaggactgacaagtccctttttggatgagccgctacgacgaaacagcatcgatagtcgcgctagcgatttgggtcgaggcttcttaccaccgacctgcccgtcgtccgcaaccggagttgaggctcggctggggaaactggcagatggcgtgtcactgccgggtttagaagacatggctataggtcgagattccgcctcggcaaagactaccggacttgacgcttgcgactgcagcttggcgggcaccggtcgcgaacgctgcgcactccaattcaagcggtcatcaggaaacccgagaaccggttgtgagcgccgctgacggttttgcacgtctgctgcatccaagttcagagaggtcgttgatagccaagcgatgatccgagcatcgcttggtgtgtcctgggccaggctctccgacaggacaggcatagaaggcgagtaaggaatggcctttgtatgtccgggttgtctctgagcttgagttcgcaggaaggactgattcttgtaagatgaacttcgctctggaactgttgggggctgttccgcgtcaggcgccctgccgggacttgacttgcgcccaaagaataatcgcctcgcccgagagccagggctctggtcaggactgtctgccgacgatcgcttgaggttccaagacgatccagactcggcctgcttgctctggccaaccaggttcatcagcgaagctgaaaatcgcttcttgaaaccccccaattctttgcctttgccagtctcaagaggtgcgctcaaaggatcagctcgcctccacttgtccgcgttgattttcttgccccgactgtccctctgaggacctccagctagcccatctcccatattgatgtaatcgcctcgcagcggttgcatggcaacgggggatggcacggtgcgttcccgcgcaggagatgcagcgcgagccacagacgccggctccgcggatgcacggcctcttcctcctcctagagtggatgatgatggcacgcgctgaagaggaccgtcggaccggaggtccatgagaccggtcgacatcattgctggtggtctcccatcaaactcatcctcgcgttcttctgcccaagagcgcagagcgttctgcttctcagaggcttgtcctcgcgaggaagagtcgcgatcatcgctgctctctcggtcctgcaacgatgcgagtccctctcgcttgccagaagacgatagagatcggaacgatgattgtttctcgaccgtgcgagtggaagagaagcctgcaattcgattgtcgaggctgagtggagagaaaccagcctgctcgtcgtccccaaaggttagagccctggccaccttgacactcgataccgaccggcgggaagacgatgctttggagacgggagttctgaaacccgcttgaatgggagatgggtacgagttgctggtctgcgtgaaccggctaggagagtcaaaggttggagctttgggtgctggagggggagtagacgaagacccgagcctcggggcattgggaggtgaggaggtgggtggcatgggagagtcgaggagtgtaggagagttggggatcaaggcaggtgaggtcgagcgtgctgaagtcgacacaggtggtccgagggtgaaaggtgcactgagggtgaggggcgaaagagacaagggtgaaatggtttgacgctgcgactgatcggcccagaacgacatgtcccggtctaatcgcctttcctgcccagaggtcggtcttgacgcgaagacgtcttcctgctgcatgatgatgatcgcgtcgttgtcggcctgcttcggctgagatggaaggaggagcgacacagcgctggctccccaggcgaaatcgccgctgctgtactttttgactgagagttgcgatgttgagagggatgtacgttaagaacaagctttattcaaagaaagaagcggtcgggacctaccgaaacaaggtctggatgggggcttgacaagcgagagttcagagcgctcgctaactaatgaggatcgactgatcgagtgcgagattgtgaggccaggggtgacaagctgctcgtcgtcctccgaggaatcgcgatcgtcccgcggggaagaggtcgaggtcgaatcgtattcgtcacggtgtcgcttggcggcgttggtcctcgccctctcgctatcgccgctaagtctcgatgttggccggaggggagagcgaatgggtatggccggggacaaatatggttgttgaagttgatgagattgtcgaaagaccaggtcgttggtcggtcttgataatagtaaagatgtcatgacggaaccgagtgcgaattttccaggttgggtcggtcaaagtgatttcgcaattaaagcgactttcagcgagcgttcgatcgaaaccgatcccacgagagcgagcgagagcacaacggcgatgaaagaggaaaggggaacgacagggaagagcggcggcgactgcagaggaggaagggaccaagaacacgcgagagagagatggccgcgccaaaagatccccgaggctgtgtgtcgattggtggtggttgggagaagacgcaatgacaggccaagtcgcccggacttgaagacgctctcacctttgatctaaatgccctcagaagggcgtccaacaaccgatgaagtcctcggtccttatatctatggagagacgcacacactagtcgcggtgacctagcacagtcagatcggctcaaaagcctccagtgccgcaaaataagctcggcttgtggagatgatagataatagtcgttcctctgtatgggtatttcggaaggaaacttcgattcgcttcgggcccaccgaaccggatgtggttcgtggcaaccaccgtcagacgtcttgcgtacgggaaatgcagctgcgatggtgtctctgatttctgatatctcgtacagggaatccgccgcaatgagtcgccctcgatctgatgacaaggctgatacacagagtgctcaagtgagtcgcaaatgtctgtctgacaaaccgtccagctggcgcgccatcagtccctgagaaggagaattgattcggctaaagtcatcctgggcatccgtgatagcgggatccgaagagcaggatcgacagggttcatgaccagaggtctgacaattcggtcgttgtggtgcgacgactcatccgagacgggtcgctgtctcgatctccggtcatcatcacgcgacagagacagatcaggagggaagatcggtcgttgatcagggcgggcgcgcgcgtgtcccggaggtttttaccacttctggttcgatcggctcgcggtcgctcaactctcttgcccctggcgctcgtctccgcgcacccgttgacgggatgacacatctcgtcacgcgcgagcgatccattgctcgacccacttccctgtctcgctcttttggcccaactcgggtagattatcgtctcagccacgaaagagacccaggagcggattaattgcgaaaggccgctgcaccggaacaacggcgagatgaataagtcgatcggtcggcaagatccccgacctcggattcattcaatcgtgtcaacccggctgagtcctgcgtcagggcgtgaatgtgttccagtggaatgaaggggagacttggggaacgccgttcgctcgcttgtttatctgatgatatactcatcatcacattccccttctgtcgttcggcttggtattggacactttgggctgtaaaacaggctctactacaacgtgggtggcggtaccggcagcggcgtcgccttctcgcggagctctcgcagattcgccaacaaggctcttcgctcgctggccgtcgtcccgcttttcttggctccgatgcacacggccaacatgtccacctgcgatctggtcaacgagacgccgtgtcgcaaagcgtatctcacgtatgcgggacacgcctcggcgtcgccgttggtgagcaccgcgatgagatcgtttcgacttgcttccgaagccgcacccttgtgcgccaccgacgatcccgtgtttggcgttgtacctgcgggagacgtgtgttgaaatagtctatcggcagaggtgtacgcttcgaccagacaaaagcttcgagccaataacccgatggtcgtcggagtcaagtcggacacgggaggcgacgagacaatgaaggcccgaatgaccgattgcgcaaacgatcgatcgtacgttcgagcgttggtcagcatgcgttgtccgccaaagctgcggacgagcgtgtacatgatgtaagggttttgcagcacacgttctcgcatctcgggggagcctccttgagaggcactctcgtaaagccgtcgagccgactcgaagctcctgcttcgtgcgagacaggtgatgtaccaagccatgtgccggggcgacagcgactcgggagctgcttcgacgtctttgactagggtttcgaccgataattgagttctgctcgcctttgcgaggaaatcgtacagatgcaagagagccgcgtcgcggggtggtcgatagccttgagttcggagcctacgatagacactccagacgacagcgatcgacgattgctcgatcgtcgcataaaagctgtcgagtgttgagcgcgctagagatagaccagattgtagcagaggaggtcctagaaggagtgccttgagaggttcgagatgcgctggtacccgcgaagcggacgatgctctggcgagttgattgaccgtctcgctccacgttttcagcgcgacattgtcggttcctgctagcttgctaccgagtttcctggctccaggaaccaacgaccaagctcgttcaatccattgaaggtcagtgcatccccgaatgacgccacaccagatcatcaggcttgtcgactcggcaaagtattgaccacccgtctggcgattggcgaacacggacagatcgaaccacttggcttgaccgagcagcttgcaaattttgagagcggggacgacctcttctcgttcgagcagtgagaccacgacccggtataccaaccatttcgcatcgcgctcccgctctcgggtagacgccgtgtcggccataccaagtccaacaacttcagccgtgtatgtatagagagtcttgtagatcctcgaggacgaggtccgcgcaaacccttgctcggcaaggtatccttctagtatgccttgcaacctgctcacgtgatcctccgtcacatgcgggataataccggtctgtccgaggccattagacgtggtcagacctagattttcgtcggcgaccgtggcgacgaggcgagagaggtacgacttgtcgagtcccgcgacaaccgcctgacttgatgtacaagctttgaggatggcgatcttgacgtcgtccgagattcgcggccggatagcaatgtcgtgcatgacaagttgccccaggtgtatggctccgatagacaaaagcgagatgatcaagcctgccatgctatcaggtgagacggacctgagaacttggtcgtaggtatcgcgggaccggatggagagcatgatcgagatgatacccatgtcccagtgttcaaggtgcggattgtccgcgcggattttcaagacctcgtccagcaggctcacgatctccttgtctccgagagtctccaagtgatccagaccgaacgagccgggaggtttcatcgggagtctatccagagacgccgagaactgggagtagtcgacatcgtccggaaactgctcgtaccgtctctcgagccgtttcgccggttgcgcgaacggttccatggaaatgtcgtgcttgacgttcaacctcatacctcctagcgtcccaaaacccctacgctgtggtcgagcaaaggtcgagattgtacggctccgtctagcgagtacgagagtacgtgctcggcttccgacggctccgagacccgatcgcaagctccgaatgacgacgggcgtggcactccggacgttgcgcacgactgcttgtctggtgtaggcgatgatctgacgtatagtcggaggtcgccaattccgtaaccgggtgatcataccagggatccctcttatcaaggcgactaatcttctcagcctcgatggtcccgcctctacgctcagcgcggcatttccgccctcgacgtctctcatctccaaagaccgtttcaagagaaacgtctgccaaccggcacgcttccctcgttccacagccgtgggccaatcgcctacacgcgcccaggatgcctccaaccatctcaaaatccgtacgtcctgtcgtttgaacagctcggtggtgatgatcgagatggtcggaggcaagtcctcgggtgagccggggaagttgctggtcgaggctaggtgtttcgagagtcgacgcgcgagcaggacgtcggtcgccagtcgatcgccgacgaccaagatgcgaagaggttgattcggagcaatgtcctcgggatggagctctgggtcgacctctctcgccttgcccttgcccttgacatcccgcgctttgaccaccgtcgcccgtcgtccgagtagcgtttccccggaagctgatttcgtcctcagatcctcacgaacggcctgtctgacctcttcttccacctcgaaatcgagcaacgggatgctcttacgatccgtcaacgaatgcaaacgcgactcgccagcgaaatacgagatgatatccttggcgcaccctggtttaggttgagggtggatcaagaccgggacgcccaatttgcgggagacggattcggcctgcaagatcaacggtcgagctgagtcagctcggcaaagctcggtgtatgggaggctcaatttcgaagctgtatttggaatcgtggtctgtatgcttacggcgattccaccaaaatctttcctcgtccccgccgagttgctgacaaccaggaccctacccggtccgaaggcctcttttaggtctttccagccattttcgatcgaaggatgcaggtgatctttgtaggggtatgtctaggagtgttttcaaagaggaggtcgcaacgaagaataagtgcgggctccacgtctgggcgggtgaatcggaaggagacttgcgaggcaattgtccttgtcgatgacgaccgcgttgaaacccctctttttcaaagctttccaatcgacatgtgagatacctacagcgtgtatgcgggatcattagagctcgaggttggtgaatgtgcagacaagagatttggttcaactcactcggggcatatagatcgggacagagtttgccggctgaaaagattgcctgagtgtaaatgaccgcgttaggcagcctcaaggcgggcatgcttgtagaatcacgacaaggtcgtgactggtttgttgtgcgggtgatactattgtcgtaagcgaggctggtcggcctttatcgatcagaaggtcagacaatcagacatacacaacatggatttcgatcgacatgcgacatgatcatgacgactgggaggttcttgagatcagagagcgggcgctgtcggaaataaaaatgttaggctcgtgcgaatcgaagcgtcaagcatcgacttcgacatcatcaacaaactcggaaggtccatcatcagctcatcaaagtacagagtatcaagacacattaccgagtgtacattctctcagtcacgacagacgaaccgccagtcgatagctgctcggattcgcggacgaaatcatgtccaacaacaacgccaacctgggtgcatccgcctcgtcggcttcgtccgcaacgaccatcactccaaagggctccccctcgaaccctcaaccgggcagattcgcttctctttccccctcgaaacccggcggtcttgtcagacgtccgagtttgggaagacaggctaccgtcataccgggtagtagcaaggccgagaagaggaggtccgttgtgaacgggacgggtggggtcgcagaagacgtcaagagtccgggagagctgacggtgttcgtgagtcgtatttgggcgtcctgcgctgtatcgaagcgtcattgagcaatttgaagttttatcatggataggtggacaagctactctcggacttggagggaaagttcgatttgatgtcgcacgacttgctgtaagttggacgcgagttttacagtatcgtcatgtcccggcctcactcgcgacgagttcatgcccgtgcacagcgaaagaagtaagtccatttccgcttcagcctgcaggttcgtaagcgaatgattactcatcacaatcccttctgcccgatctcgcagtgaaccagatgtcggaccgaatagaccagatcgagaattcgatccacgaaatcatctccaccgaccttgatcagcatcatcatcaacaccgacgttcgtctgacgaccggcccgatgcggacgacaactcttcccctcgaccagcctctagccctcgactcgatccgctcgaacgggatattgcgaaccggactacctctacaggagagtcatctggagacttttcccggatgagcaaagggcaggacgaggcgcacgaggagcagagcttgttgctggctgaaccgcctatcggggtcgggaggcgcagttcgggttcgtcttgatcgcagaccgcgatatcgtctgtgctctgcgcgggacaatagagggacacaagggaaggggcacttcgacatccgaaaggtggggtgagacgagaatttatgagcgagtcggaacgagatggactgggatatatcacgaccttgagcgatgtaatggctttcacgtatcgactgggatctatttctacaaactttgtaacatccaatagagatagcaacggcctatgtcttaggaccgaggtgcgatatcatagacagctcagcgaggaaggatacgaaagaccttgattcgtacttgcctaatctcatcagcagtttgtccgccgtccttacctacggtattggccccctagctaccaccaggccgcctgatcacctcatttggctgctccggctttggggacgacgctcacgctttccaaggcaaggcttcacgcgtttcactagatgaacgaccggacgacagaccatcttctcatggatctcatgggatattacttagaacacttgccatcatttcacttgagtaaccttgatgacgtagatcgagcgttttcaaccggacgttgcccaaccatatcatttcggttctgattcttatcccgatagtccgcctctactttgtccatggttccatggtgggtgctcgaatcgtgcagccgcattgaggacagttagcaagaacgcattcggtcttacacaagctgaggacggccgctgctatatttggctggtggtggggaaagcgaacactggttgtacgatattcatagtcgctcgctgagatcggcctgcatcgtgtataatggcctgtgagcgctacactatttattggcgcttacaatgccttgaagtcccaccagtccttgatccgcagcctgaatatccagcgacgattgaagatcaaagactgcggagcgagtcagtacgctcagctgacgacactttgtgctctcgaccttgttgagatggcacgtcgcagagatccgttccatcaggccggatcgagtcccgccagtgacgccttttttcaggatgaagacaatgatggatggtgacgttgctgcttaatgcgatactcgatacagtgcttccccctctttttccgatcacgcccccgctcgtgcacgctggtcccggacttcgctctgcactttgtccccgacatgatccacctgctcgtcatccttggcgtctgaacccgaatgcgctcgttccctgattcgttcgaaccaactcgcgccggtcgaagacgacgtcgacgtggacgaggccgctgccaaagctgcaccaggcgtcgaggcggtcgtgttaggtgagatgtggaggagggactcgatgctggcctgaattcgacggatggcgttgggtcgatgatgccaggcaaacttggtgatcgcccatccagtacccaaggccgtggcgctgaaaaaggaaggtgcgacgagcatggcagctcccgaggtcaagctggccaggagtgttccgccgagggccgtcgctacggctccctatgttgagatggaccgcctcagccctgtcgcgtgaccgcccatttgcatcgcggggttactcacagctacagcatatttggcatatcggatcagtctccagaaaatgtacttggaaaagtacctcgccgtggttaataccgaccgggtcttccagctggcagggaccgccgaagcgccggctgctgaaccgtacacgagataggcggcggatttcttgaccgtgtctagcttggtctcgggttcgcgcgtgcgggtggtcgtcgttgtagacatgttgacgatgtcgggttaaggtcaaagtgagtgagacgtgaagatttatcccttgctctgttctgactcgaatctcagctcagattggcggccaccaactagatcgattgcagtacaagcagtagtagttgatgccatcccgtatcctatagatccctctgacgatttccgaaacttgacgtgacgtcatatttttctatcgacgagagagcgagagacatcaacggacatgcgatacgatgcgttgatgtccgtctcctcgcgcgcctcttctccccaataacacgagtcccattggcccgggtgttttcggaacttcgacccgtctccggcccgcgtgctcgaccagccaaaagtcgcccttttgttttcacgatccgtggattgggcggaagcggcgagtttttgcaacttcagctgccgcgctcagccttgaccaacgtccagggttcaaattgtttcgatcgatctcgaccacttttgcatgatcatatcgccacacatctagccacccaagacgcaaacgctcaactcctacacctacccaaacaacccacatacaaaccttcttatcaaaatgcctggtaagtctcccgatccgccgccccggctctcgcttgattctcgcgagctgatcatcgacgcatcacctcgccccggatcgatctctagccgatctcgccaagggtgcttcgctcttcaagacccgatgtgctcagtgccacactctcgctgctggtgagcccaacaaggtgagcatagaatcacatccttcccctagtctggttgcaatgaagccctcgaagacggatcgcttacgtggatttgacaaactccttgctcgtgatgcctccatcccttcgacgatccctaccttgactcgacgcacacccaggtcggacccaacctccacggagtctttggccgaaagtccggtcaggccgagggtttctcttacaccgccgccaacgtcaacaagggtgttgtttgggaggaggacaccatgttcgagtacctcggtgagtcgggcctctcaggcctacgggtttcgatctttactctggattactgatggacttgtaaacttgcgcactatagagaaccccaaggtgagcttaacttcgcgttgacgcgaaactttcgaaattgttgcgcgatctgaccccttcccgaccttggctttttagaaatacatccctggaaccaagatggccttcgctgggttgaagaaggctgcggataggacgaatttgatcggctacctcaaagccgaaaccagcaagtagttctgtctttgtaccagtgagaccggacgatgatgctttcgattaccatatgagcctttcgggtggatctgtttcggccagatgcaagcgggcgggttactggtttgcttcggagagtgagacggtacagctttctacgggtcatgtcacttgcgagggtgaacggaggaattctcctcacgtcgatgttaggcttggtcactcgcaaaggtcaatttccagtggatcggtcgatcatgcccgggcaatgcagccttgccgctctcttgcgatcgaggaggaggtgcctggtcatatctacttcaaaggagccctcatgacccggagcctggagtgattctcaacctcatcatcgctgatgtcgttcaaagtgcgatcggaagtactttcttcaagactccgctgcgcatgacatgttctaaaacccatgccacagcaaggctagttctactcaggaggagaacaacagccttcgtgaatgcttgagatcaaccggtcaaacaagctcgggcggcgactaactttcctgaccctgcagccgtctctgtcgttcacatgaaccttccgcacggcactttttcaatggcgtagacgtgggcatcgtcatctggcgaggtaagcgtttctcaatttaacggtggattctcatactctcgctgcgagctacgttgggactgggcgcgcacggtgactctcgaggtcatgctcgagcgcaagctggcagaatgattccggtgacctcatcgcgaatgaaccaaaaaagccggacttatcgagactagcaattttcttcaacgactttatggcctttttggctactgtacgtgaaacgcgcttcttgaacgtttccacggtcacgttcaagagaacgggcgaaacgcctccggaagctttcaggcggtcacgcactttgacgatacgctttcagcgcgtcaagttgacgcccccagaccaagaaaggctagcagtccacgcgtaattttctgcttctccgcagacgaaaacgactcagcatgaggcagacccacctcgaactgagaaacgggatcagccaacggttagatctccttaaatggtcattgtgcaccgatctctgggcggcttgtcatctagatgggcaccgacagaccggcactgcccacgtctgagtttgagacgtacgaaaccgacgacgtgaggccgggatgaaaactcggatttccgggtctcagggttctaaggttcgtacgatgacatcttgatcacaaaataggatcaacctataacacagcgttgctcacggaccttcgatggtagagagtcggaaattcctccccgtaaggagggaaagcgaattgatgtagccggacttggcccattcagccggtgacttgctgtttctgtgcgtcagcttaggctgtaaaatgtaaacttgcgtaattcgataatcgagcgtgttgttatagatcgtgttttactgcatccgattttgtcgtgattcggtctgattttgccgagtatgcctaagtgaatgtcgttgtggcgtattatatctgttgtaattcatcgcgatcttgtcacgtgtataagcgagtgtcgttgtgaccgcaggagatgtcgttgtgtgcggaatgtcggtcttgcaatgcagaaaatagtggagttgcagtgtagaaggaacaggtgtacatgcagccgaccagacaatcggagtgatgacctttcgaacggttgtttggcgagaaaggtggagggtgttgcccaggatgagaggaaagtgtttgtcgaaacgagaaggaatatatgcgggagcgagggagtatccccgcgcgggaaagttatcatgaatgtttgtgcagttggtgcgtgagagcggatacgcgtcggttccctcgattgaaggcttgaagggcgtaaaagaatttcccgggtttgttgtagatcgggacgtcataagccgaggggtacgatcattccccgcacggacagcggatgtgatctggcaacttgaagagcccgcaaagatggatatgggtaaagagagcgagtggactgaaggacggcgaacggttatgataccagttgcaagtgctgtcggtcagccgcggttcaggaagatccgggacgacgtggaacagtgaagatgttttgtgcttgcacggatgatagcgtagtgaaggggaatgtgtcgtcggtaaagttgtcgagaaggacgcaatcatggcgcctgtgaaaggcgctgttaagagtagcaacgagcagtaggcattcgtcggtgaattctgatgcgaaggtgtgccttggatttcaacgctttgtggcggtcttcagacctgcggctttcaacaattccattttctacaggaccgtatctttcgaggaggtcttctctgacgttttgggtttcttcggaacaggtgatcgggtctgaaattgaagatgaaagggtgtgaatttgctgagcatggcgtagcgaggattggtcgtcttccatgcgtgtccacgacagacatgggccgcgcatttgatagtgagaccgtattgaatccaggcttttccagcaccgcccagcagttgcttccagcgggcttcgcagttcagtgccggtgatcctttccttcgcttagatgcgagtgatcgctcttgctctagctctacactttggacggctgatcctgatgttgcctggatgggacaatcggccgcgactatgatggaagccattctcaggagaatggctgagagaaatcatcaagggatttgaaaacagtcacaaacgctgcaccaagaaggagacccaattcctcaagaaagctgtggagactctagaggctcagggcgcttctatgcccctaacttcagcgattgcgatcagttccatggatggcctccaacatcaaactccgattgcaatttaaattaggttcaaggtgatggcgacgagccctgagacttgatgtacgcggcgtgaccaatgtcgatgcttatcccaagcggtagatggttccttggaccattagtacttatgtcatgtccatgggaagaattttcccgatagcgtgacaaggtcgtgtagttggaactcaaccgtcaagaagaccttgcgccacctttgagcatgactcatcatatatcgtgacctgagccttcgcggataaccaccggcatctgccttacccatattcgaacaggatcgttgcgaatatacgggttcccaacgtcgtgtcagaattcggcctgcaaagcggagccggacgaaccattacacacctggtggctcggatcactacagtcgcaatctgatccgatgactagccgcactcccttgtccggaaccgtcacgccccacgaggggttctcgaccgagcaatatttcgaaacgcaacctccacctcctgatctcgaagcacggatacagcctgctcgagaatttgtcgaccgatggaatcgagtacaagggaagaaggtcgtggtcgtgacagtgagtcgatcgtcaggagttccgagactggtcaggtgctgatgaacatgtcacgtgcagagtggaggaacgacggtaccgcttgaagccaatacgtatgtttgttgggcgacttgcagccggcatgacttgctcagacaatacccatgacagcgtgaggttcctcgacaatttctcggctggtaagtggtcggccgagtcgagcgacgagacgctctgtattgacggttgtcccccctcgcgtgttaggaacaagaggttcgacgtcggccgaatacctactttctgctggctacgccgtgatcttcctgcatcgacaacactctctcaagcccttctctcgacattattcgcactcgcttaatccattcctcgacctgctcaatctgccagaggcaggagaacaaaacatctcggtcaccaaccaggatgccaatgagcttttacctgtccttagagcgtacaaggaggcgcaggcggccggcactctgctccaaatggacttcaacacggtgaacgattacctgtggatactcagggagatggcaggggtgatgggagtgttgggtcgtcgaggaatgttctacctcgccgcagccgtcagcgactttttcctcccattggaccgcatggtgagcgtgctagcgtcaaactcaacgacaacatccgttgttgaatgatgatcgactgtactacaggcggaacacaagattcagagtgtcaagggaaacctcgtgttggaaatggatcaagtaccgaaagtcctgcggccactcgttcaggagtggttgcctgaggcatacatcgtttcgttcaaggtcagctgctgtgggcccctcgatcagtcgacatagactcatttggcctcgaccccttcgcatcctccagcttgagaccgagcaagcgctacttatccccaaagcacaaaaggccttgacccgatacggtcaccaagcggtcgtcgcaaacgatctgcataaacgaaagcacgaagtgtgtctcgtggaaaagacaccacagtcgagtcgggaaggcgacgctagcgagttcacagagacgtggctaaagctggaagagctcgctagccgacggacatctggcactcccgagattgaagagctcatcatcgatgagctgctaaagagacacgagatttggctaagagggtagattccaaagggcagctccgatcgtcgtccgagcggtgaataccgcatagccaaaggcgagaggggtatctggggcttgtagcacggacggaacccaatggaatgcctgtcatgcagtggtaaagaatgtcaactccgttaggccaatatcgtgcccgacgagctggcccttgaccagtctcagcctctcgacatctcctctgagagttcccgccaaaatacactctcccgacgtcagtgatgttattccatctcatcgggcgattgacctcacagagcgcgggatataatttcatttgcttgtactgagtgaccggagctacggctacattgggcgattacaatctggccggaacggcttcatccttgaacaaagaatctccctcggcgtatacagcgtcgataatctgcttgtaatgctgggcagcagcttgcctgcgtcccgcaaaacaatcgaactgggtcagcctggcggacaacgagagctggcaactgaatcatcgcgattgactcacctcttgaccttcaaagtgggtgtgaggacgtgctcggggaagggatcaacctcgaggtggacgcccttgatcgtctcgaatctgacggggagaggtccgatcaaggtcagctgggagatcggtcatcggcgttgtcagatgtggctatggacatacccagtcaagccagccttctgggacagcttcttgagatccttcaggacgtgtcttcgaacccgcttgtcgttgatgtgactcttgatcttgttcaggtccgtagcgtcgaccttttcaccaatcacgcgctgaatcagacccgcagcctgaacagggtcgcagataccgatcaagatgatatgggcctggagaccatcaccgtgcaccagcagagtggagaagagagggttgagagcatagacaccctcgaccttttcgagagcgacgtattctctgcgcacgacggaaaagcggtagcagccgataagtcctgcggtcaagaggctgtcttacagagcgcgcactcacccttgcgagagcttcatgacgttcttgattcgatcgacaatcttgacccgtccggcgttgtcgatcgcggcgatatcacccgtgtggaaccaaccgtcctcgtcgatggactttttggtgttctctgggtcgcggtggtatcgcgagatcaaaatgggaccaccgataaggagtctgtgcgcgggacatcatcagaatgggaatggactgatcagagaatccgtgctactcactctcctcgagggaaaggcttgtcattgacagtgtactgcaaagtgacggtcgggagatttgagtatgccgcaaatgacaagattggccgtttgtctcacattgagctcgggaacatcagcgagcttgagcttgataccggctcgaggatatccggtggtgcccaagtgacccacgtcccatgcgatactagcgagagccaatgctttaattagtacgatgcatgtttcagaaatctgaaacacgtgaatcgatcccaagctcacccggaagtacacgttccaacggtctcggtcagtccgtactatcatcgcacaatatgtaactcgataagccaacggatcgacccatcgcgggcctaaatcgagcgtaccccttcggtcacatcacaactgaaacaggccttgagcacttcaaggacctcgcccgagataggagcacttccactagcgatgaacaagacgcgtcctccgagcaagttgcggacctatcgaaaacgacatccgaatcagcgctcgtttctgtaggtccttcccaaagctatgcccggcggacgcgcacttttcggaagacgagagcgtcgtaaatcgcatgcttgacctcgccggtctttcggtaatgctggatcttggcgttgatggccttggacaagagggctcccttgacccctcccgccgctacttgagccatgatggcctggtgaatcctatcctcgggaatagggatgcgatcgattcagctttcgacgttcactgccgaaaaagcagcaaacccatgagctgacctgttcaacaccctcggcaccgagggaaagagatgcggctggatgatctgcgcatcttcaagcagacgcagagggtctcccgtggtgtaagcgatgacaccatcgatatgaatcacgagcagttcaaagaacctctcaaagctggatgtaccgatgaacaggaaggtcagacatctctttcctcgaggtggctcacgacctgtagactcgagtccgactcacatgtgcgccaaaggcaagtagctgatgaccacgggctgttcccactcgggcacgctggcggctcctagcgattgagcgacgaccccctgagtgacggcagaatggctcaagacgactcccttggggttacccgtcgtcccgctcgtgtaactgatcgtggccgtctggtccggtcgaggcggtctgacctggatctttcgcttgagcccctctttggcgccccagacttcaaagtcgggcaactcccacaactcgaccccggtcgtctctgcccacgccctcaagacggatccttcgcgctccatgagcgtgtccatgctgacaatcacgcgcaagctcgggcacttgggagcgaccttgagcaaggccgggatatggctcgacgcggtaaagacgatgctcaagggagagtggttgatgacgtactcgacgacgttgggtccgagcgtgtcgtaaagggggatcccgacgagggagaacgcatgtccggcgagatcgaccagttgccattccgcccggttcatgctccagatcccgaccccgtatcccgaagcttcatcgatcagctcgggtcgaccggaaggacccgaacctcggggtcccaatcgaccgtcttgctcgagcgcgacgatggcacgaccaatattcagcctcctctcacgggcggtcaggtaggtcatccccgtcaagacgggagagaagactgccggcgaggtaggagtcgcgggcgacaagagtggtctccatcggaaaacgtctttagtagggtttcggtcggcagctgcatagggtcgaacgggtcattaggtgggtgaaaggggtgcgatcgttctgactcgaagtcgtgctcacactgctcaaagagctcgtggatcgtgagcggctggttctgagtcagggccgagacgggaaagatcgctgtagccatgaaacggtgaattcagcccggtcctcgattgatacctatgagacgttcttacgagtcgtgtagacacctgcaagtgggaacacagcctctcgtcagtcggcgtgaaagcgctcacgagctcgttttgcgtggcttaccggattgtccagccttggcggttcccggttgctcctgcgtttcacaacacagtcacggatgagcagaaattcaagtaaccttgcttcatcgctcatactcacgaccgcttgacgggtcaagtcgaggtcctctgggtagggaacgatgggcatgttcgatggtcagactggacgtattgagggttacggcgttcgatgagaaagtcgtgatgacggttcgtgagagtgtgtgcacgggaaggaacgactctgtggctatttgaagaggatagacgttgacgacgacagctaggtcagactcgactcgactcgactagactcttgtgtgtgcatgttgggtgcggccgaggtcatgggcgaccacaagggggaggggggagcgtaattaaccgggtcattgccggttcacgcgcggatgcaaaataggaaaatgggagttgattcccggaatctcacacacacacgccacaaccgaccccggggggttcgacaaacgattcccgttcatgcttcgaccatcacccgatgctcacacctctagagctacagcgaccacaccttgatctctccatccttacccccgctgacgaggtacttgtcccaaaacctcatcctctcgaccggcttgacgtgtccgttgacgacgagcttcttgtgctcgcccgacgtccggttgtaaacctcgactccattctctcccgtgcacgcgacaatcttgcgcgtgtcaaattggaccgccgtgacggggaaatcgtacttgagcgtgtcgacgatactacccgttcgtagatcccaggtctgtagatgtaagatcacggccaagaggtcaatcgtcatcgagcgataaaagggagaaaagtgaccccccgtgctaccaagtctgtcaggactcactcgaatggtcttgtccagactaccgctgatgatataagactcgtcgaattgcaaacacgttacgggtcccatgtggccaatgagcgtgcggtgcgcttgacccgttcgcactgcaaatagaaacggttcgatccggtcaacttcacgcccgacttgcggccccgttccttgtctacccgactcactatcccacattctcacacctccatcgccgcttcccgttgccaaggcgtaaccccagaattgcacccctccgacgaaatcctgatacatctcccaactcccatcagcgaacggtggagtcggcacggcaaactgtcccgtcgtcgcgttcaatacccctgacccgggcatgcccatcatcattcccggcccgggagacgcgaggaagggatcgtcaaacgggtcgtaatccccaccgccagcgtaaggggacgagatcgagttgcgatacgtcgaccccctgcctaggatgcccggtcggcgaggggaactgacgggggtcgtcgccgggttgatcgtgttgatcgtcatggccggtgggttcgagatggcccacagaatgtccatggtgaggatacattgccccgtattgacgtcccattgccggaccgtcttgtcgttggatcccgtgaccaaacagttgtcctcgtaatacagcgacgtgatgctcttgctgtgtccctcgagcacccggagacaaggatctccctcgagtcgcttgtccttttccatggcgacgccgtcctgatcatcctgctcgtttccgagaccatgctcggcgatcatgtcggcgcgtacgttgggcaacctgtgatccgcgctggcatccaacaagccgtccaaccctttcctgcgcttttcctcggcctcgcgccgagactcttcccactcttccaccctgcccagctcccacaacctcacggcgccgtcgctacctcccgtcagcgcgacggcaccctcgacctggacacacttgacgagtccctcgtggcctctcaataagcccatctcttctccatcacagagatcccagacccggacggtatcgtcctgaccggcggtgacggcgactccgtaaggttcggagaaatcgagcgaggtgataccgcccggatgagacgagagggtcatgaaggcgacgtcctttggcaactcgtcgtgctccgagggcaaaaacgcgggtccgcgtcgtcgtcgcgatggcaacgaggacgacccctgtgggtgatgggtggtcgacgatttcgagaggtcttgaccagacgacgtcgacgtcgtcgtcgcgatggccgggttggtcatggcttccttgacgccctcgactgcgggtcgcaaagtcgtcgaaacggtggtcagtacaggtagccttcctgagaaaaccggtgctatgcacgagcgcgacacctgtactcacgttcgtcttccagctcgagctcttcctcttgcatcttgatcatgctgccttccaatcgacgtcgaatgacttcgagggcgtcgatcttgatggtcacgctttcaatttcggcggcgatcaagttctgcccggtcggggtacgtatcgagtcgggtcagtgaccaagaccacccgtccagggttttccacctcgcgctcgatcgccagtcccccgactcacctttcttacggtcaggttatccttgtcgaccgcgatctccttgacctgcctcgtcaattcgtccaaccccaacccttcaatgatgcccaactctctcgctccttcccccttggcccctctcccctttctcaagcgtcgcctcctagatttccttgccctcgaccgttcctcttccaactctatctcggtctgctcctcgccctcgtttgtcaagagtcccctcgcccgatctcccagctttttcaacccgatcttgttccgtcctgccagcctggccgccgaggacgatcccgcaccttgcccgtcgtcatcgaggagcaagagatcatcatccgccacgcccccacgtacccgacgtcgacgttgcttggcgagctccgaggtagggatcgtcgccttgaacccccggatgagggagacggggttcccagccgtttcccctctttccgtgccctcgtgaccgttctcgatcagcctgttcggatcggccgggccccccggtgtcgatgagccggggatagctagtgtcaataacgaagggacgttctcgatgatggccaacgaggtggaagtctctgccggttgtttgtaagggatgtgcgtggtgaaatgacctagccgggtcgtaaagctcgaactatccttgaggagggcgaggcggggatgattctggccatacccgagcgcacgggaagcaccctgggatgtcttgagtgatttagcagagatgacgtgcgggacgactggtccccgaggatcgagtttggggagatcagcgtgtgattcgatgtgaggagtcgttcggaagcggaaaagaggagcaagatctggttggttcggggagggggcaacactcacgatcgttcaacttggtcaacccttctgcccgcctggattcgccgtgaaacggggtcaagagtgcttctttgacgatactgagcgtattgctcgagctcgccaaggtggccgcgatgggttccaaagcgtcgctaaatgggcgacgtgagctcttttggttgctcatcggatgataggcatcgagatgggtcgttgattgggagcaggattgccagggtggtcgactgtcgagaggaggtgttacagaggctcaaggcctcaaggagagctgaccttgaccatgaccatattcttgctcgtttgtcgtcatcggagtaggtcgggcgagaacgagactggacgaggtcgagagagagatgaacacggacatcataaatataataatagtagtagtcagtcgtcgtcgtcgtcgtagtcgcgtagtcgtcatcatccatgtgaccatcgatcatctaagtacgatgtccgctctttcggggcgggcgggggtatgttgacaaaatgccatcaaccaccccatgtatatagcatggattgcttactcgaaccgctcgctcccatcaggtgcatcgacacgtcgacacacataccgcatgctgcatgctgcatgccgtccgtaccagatggacgctgttcacatcgagggcttacgagtcaacttgctccgtcgaggtccgtggtcgcggggatgattgattgaagaataccctacctttaggtttggaatggttcgctctcgacgcgtgccgtcacgtgaatcgcgtcatcttagcaggcagcaggtcgatcgacgagcgaggttcatgatcatataggtcgatagcctttttgcatctttcttcaactcggtcattcctgctatccatctcatcgaacacgcctcgactcgactcgactcgcgaccatccgatgtcataacccctgcgctggagctttctcccctgtgatgatcctcaaactcctcggtccgcacgatctgaaacccggcaccgtccccgaatcggacacggccatcagggggatcgtcgggtacgtcaagacgctcattcaagacgctcccttggaattccagctcgtcatccacgaacctcctgaatcctcacacaagggacctcataaaaaggcctcggtatcgatcgtcacgggtctcagggaacgaggcggtcatactcgaccgctcaggcaagccgaacgggcgctcaagcaggccatgagggataccgctcaggtcgtcctccataccggggggatcaagggatgtcgtgtcgagaagaacaggctcaatctggacaagcgacgaagggaggtcgaattgaagctcgagaacgggtctaggttgcaagtcgtaggtccgacgggtgatctcggtcaggtcatcgatttctactctggcaagtcgatcgagcgcgtttgggaacgtcgagactcgacgaaaagatcagacgactgaccctctcatccctctctcctccccgtggtacacccccacctctgaccttttttgtcgacattgcatagaatcatcagtgcaagagcgagattggttctccagcccttctccatctcaagaaccggcctcacctcatcctaccgcaggaacaccccccggatccccgaattcgcgcagcaagaacgtacctctgacggaactgcccatcccacaccctcgtcctcgtcctcatccacattcacgcgctggacacgggctcccggaagcgagctcgagcaagttgccgctccttgtccgggacaagactcagcacccgtccgtccgcgtcccaggtctaccgggtcaagcaagtgtgaacgagaggaaacgtccgagggaggcttcgatctcgccggtagaggatttagcggtctcgcctccccgtgcgaagacggacgtggaaaagaacggggccctagtatcaggggtaatagcaaagactatagtcacgacgacgatgacggcaaccaaaggtcgctcttccactaccgcgaatacggctacggtgcccgacacttccaataccgacatcgtcgagatgacgaatcccgaaccgaaaacgaacggttcgacggtagcatctcggccggaagagatgtcgaccttgcgggtccccacccaggtcgaccgggacaagcatatcgcgaaacgtctcaaagcgcagaaaaaggccgaacgagttcaagctcgcgtgctcgccgagcgggggggatcatcgatcggggaccggcaggaaaaggagcgaaaggtcagggaggagatcgatgccgtgtacaagcgacggttgggcaaggcctcagggttggaaatcgaggtgagtggcgagaagcaacaccgaccgccgacacgcagaagagctgaaacctgtcgtggtcccggacgacgtatagtatgcgtacaacatggtgaccaagaaattgacgtaccggacgctcgatcgctggatcaacagcgatagagagatcggcaggggggaacggggcgatacgattggggtcatcaaggggttctcgttcgtcccgggcgacgacaagggcgagtcgatcgccgatcacgtgctttggtcgaagtcaggactaacaggaatacgtcccgttcgtttgcaccaaaggtggtcgtgatcatcggtacgactttcaattgcgagatccgacgctggacgcggacgatttcttcatgctctcgatattctccaagaccctcctgaatttccccaaagagataatgcaggggagtgttctcctcattagagatgtctgggcgagtctaatccgggtctctcgtcgagcaaatggcacgagctcaagtcgtaccccttcttacgacacagatcacccaaggatcagcagggcgacaacgggtcagcggaaagacacagtccaactctggctttcaatgggcttgcctagagttgaaagcagatgggaggacggtcgagcacgtcggaaccggtcgcaacgctatcaagtatcccgagctcggtccaatggaacgacacgccatggcgaggctgaaggactggtggtccttgttggttcgaaacgaggcgggcccggaaagcgcaatgatcggcgggctggaatcacagcacatggtaaacggcaagaccgagaagcgggtcaccgtcagcgagatcaagcctgcgtttttctacgacctggtcgtcgaggtggggctcgtttgacgtggttccgagtacagggctcggctgatcgtttgtcgaaatccgatcaggtcttgcacatttcgtcatccaggacaggcgtgatcgacgtctacgtcacggactatacgtcgaatccagaaattccagatgacgacaggttgctcgcctatcgtccgcagctcaagggcaacaagattatcgaagctactttctgggacgataacgctgcggaagcgcagattcagggcctcaaagccggcgatttcgtgtttctacgcaatgcacacagtgactttaggaatggtaccatcaaggtgaaccttcggagcagcgttcggggaaaacagggatcaatcgatgtcggacaaagttggaaaattttgaatattacaaacccgcttgtggttgaaatcttgaagtaggttcaatccggaacgatcggttgacgctagacctgaaaacgtactttgcccacagtcgaaaggaagatctgtcgcaaggggagccttcacaggtgcctactcagcaggagccacctacaggctccgcagagtctgtttggagcggcaagtccatcgtcggggccatgtcgtccccgatcacgtgcttatctcacatacaaacgtagaaaccatgaatgctgtcatccacacaacgcacacagaccaaagtcattccacgatcaaagagatcctgcaaaatacctctgtaccgaaccgtttccggctcaaagctcgcaccaatgctatcagaccgctaatgaaaccgggagacatgatcgtaaagtggtgcaccgcctgcaacaagaggttcgtcattcgtgctgcgaatagacgaagtataacgaatattgatgagtttgtttcaaacagctttatcaaagaatactgtctcggttgcaaagataaagacctgtcacacgcacaataccgctaccggttttgggcaactttacaggatgaaccggacggtccgacattaccatgtcagctggagcaccgttgcatagtaggttccgatttgacttcaccctttgataagccgtctgaccagattacgtaaagcaaaacctcttctacaagttacccggtatcgaaacggatgcggctgcgctagttccgctgttcactcaagcccggacgaaaattcggacctcattgtgggatcataaagtgaacggcgatttcccacgcaacatagtcgattggagcatcgaaagttattctgtcgaacacccgctagtacctgggcagtcaatggtgatgtacagggtctttgggatgactgtcggatgagccatcaaaaggttgtggagatataaatctagacttgcggcatagaccggttgtaacccgacattatcagttgtatcggaggtggcctctcctattcctccttgactgttgccttgtaggtccgtatgtagacctggaaggcatggttgaactcgacttcaacgtgtggctagaggactgggtgaatcagagaggtggtttatgggtcaagggtgaattggtacagtcagtcccagtgtgaacaattatgtccgagtggacagatcgacggtactcctttgttccgcttctccgtttcccttggactatccgaggggcaagatgacctacgatgatccgcgtatatataagcaggaggcgagagcggcaatcttatgctttcaaaagcataatgttgtgttgctaaatgtgatcagcctagcgcttcgatacgactgattacgacttgcgacatgggtaagctttcgggactttctacaactcttgagtttcggtagctcatatcgtgtaccctctcatgtgatatttggaattgaccacgtacggctcagttggaacttacaaagaggtgcagcaaggtcgtttgcataggtgataaggctcacactaagtttgggctgactcgtcacacaacacagcgacaggttttgtcaggtcccgtagcaccttgtccggattcttacagagttggctgccgcgggtgtgagtgaagcatgacgccatataggtgttagatactgattgttgactggcaagacagggctgcatcaggtttacaagggttcaatcttgcatttgctatgggttcctatcctgccgctgggcggtcgtaccaagctgaaatgtctcaactgcggacattccgaaagacgagcgggcaagtgcgcatatcttttggatcgcggcattgtttctgaactttgtgacggacaggctcaggaatgactggatcttaccctccaatgacttacacaacgtcagtatacgttttccattttaagcggatgtctgaaccgagagttatactactgacatcaatctcgtcaccaattctgaaagcgtcaacttgaggcagccttatgttaggccgccctacttcgcatctagcttgtctacaggcagatatccaacaatgtcccgccggcggagattatacgcttggtaatgtgtgaggtcgcttgtaaagcgtacaatatgcttcgaatgtaatgacgtgctacagggttgtcgtggtctatgagagtcgttgaaatccgcttacagctacaatttacttccagagatcttctcaaacagaaacgtgatacgccccccttccatcgcgctcagatcgtatttcgcgctagtcagttccaggttgaaactgccggcgtccctgatgctctgagcaacgtcagcatggccggcattatcgagctttggaccagtgtttcgccgctttcttcgtcggaaatcagacgtatcgctggcatcggattgattcccttcctcccattcaggtgagggcgatacagctgcccgtttcttgctgcggcctgatatgacggggctggcatcctttgaagctctcgcaacctcctcgttgctgcccgaatcctcaggacttgcaagcttgactgatccgcgggatacagttctctcgtcatccgagtctgacacactcgcatcttcaaacaatggaggagccgtggatggcggcattttcttcccacgagcagatcggtatctgccaatcaggccagatagcagatcgtccctcagtaggttcagcgactcgggaatttcagggtcgatatgagtccatttgtgcaacgctgccagcttcgcttgcttatctttcgcttcctataaagtatagccgacaagtcaacttcaggatatctgaggggagcggcaggctggtgaagctaaattcacttttgctgcttgttttttcgcctatcgtggagaatgtggcttagcccgagctgaagtttcctgccatggtgaactaactcacgcctttgccatcgtactgggaagcggcgacaaacgccggttcgtcgtcctcgtcatccgtactgtcatcatcttcaaccgtattggcgttcttcagcgaggtcaattcagacagatccggcaggtcctcctcgtcactcgcttccgacggcgtctttgaatcgtcatccaggttgtattttttgacctgttcttgcaggcattcgcactccaacagatcgtctgagtgaaggagatgtatcagggtccgatttaaaggccacacgacggggaactgacgggtcaaacagccgttggtctttgtttgcacggtaaacaagtccttgagctcggcggcgctgaatgctgtgattaagacatgtttgcgtttgataagtatcagggcttacaagaatatgtatggcggcttaccatccgaattgccttttgtgttctgagcctggtcaatcagttgatccgacagaccagtctttgtcacttgacgctgaaaaatttgtccaggcttgagcagcgtcatggaaacctatcgcggcgccgaagactgacctgatagattttctcttcaatagtaccagttgtcagaaagcggtaaatatgcactggccgtttttgtccatctcggtgaatccgagcctgagcctgcagatctacagtgcaataaaagatgagcgcaattacaaactcatggtgtggggctggctagacctaccggtactcggattcctagaaacatggattccaatagcagaatgagcccaatcagtcccgcataccaggccaaaagatgcaagcttaccaatcgctgtcgaacaataccaatcttgatccgctgcggattcatttaggatatgtgagctttacacgctattgttagcactcacagggacctacccgatcaggttcaaaccaacaccgcccgccttgctactgagcaagaagacgaaagactgttgttggtttccccgattgaacgagtcaacgaggtcctgtcgattcttctgcgccgtcttgccatccaatcgcaagctattatatcgtaatttcgtgcagtgcgcttccaacatgtctagcgtgctggtgaaattgctgacgagtacaatcttctcgtcactatttcgatagagagatgcgaggagcctttccagcgctagcattttgcctatccagaagaccaaatcagctggcggaggtcgaatttgcttactggtcgactcaccactcaaggaggtatcgtgcaaggcggagcgatacggaatgagttgtaaggcttccttcaagtcggcttccagttcgcgctctccatcctctctatctttcaggagctatacattgaacacaagtcagtctaaggccgcgtcgtcgctgacgaacggcacttacaacgggggaattgcatatctttctgaggatcgtgactttggatgcagaaacgtgagtcagttgagctcgacttgtgacattcgacgtcgactcactcagggccagacattgcgctgtcgcgccacgtgtgaaggtttgcaggagcttcggcgtgaggattttgtttaggatctggagctgtagcggcgaaggtgctacgtagacaacgtattcatctgagaatggcttagagtgtcagtaggctgatataatttcgattgagagggaggcacctacgtttcggtgggaggtaattggaaaggatatcggccgtccgccgaagaacaaattctctggtgatttctccaagctagaaggagagtcagtcccgtgcgacaccaccgtatgtccagggcgaacaatcaccttctctgctcttgcctgtccgagttgctgatctttggccgagcatttcggggctctcgatttgagaatcggcttctcgtatatcttactaaatgctgaataagtgtcaagcaagccaggacacgcgaaatcggcctgaaacaggttaaaggatcagccagcggaagcacgcaatgtatgcgaccgatcatgtcgagacctaccatcgaccagtactcctgcaaatcgttctgcaacggtgttccggaaagtactgcatattcgagagaagggtaagactgcgccgtctccagtaaacggaccatgtctgcatactgattcgtcgcttcgtgcttaggctatcaaacatcttggtcgtcttgttgtctttggatttcaagcggtggccctcgtcacaaacgatcagaccgattgggggaacacaggtcttgatggagtcgctggtagatccaacacaaattcagcgcgatgcaaacagcatggctccgttggatttacatcactgttctgagctgaatccccgaacgagagtcttaatacggcgtgtttctgtcgccctcagcgatagagcgagacttaccttctcgtaaccaatcaaaagcacttgatggcccttgctattcgcctgcaaaccttgaacttagcacaaaacagcttggatcaaatcacacgtacttacgaattgacggatcttgtgcttgtcaccgtcaccgacgaaaactccgatcctgtgtcttccgagcctatgtgtaacgaaagtgttaatagacaagtctcgcgcgttcggtatatcggcgcaccatttgtgaaactcctttttccagttctggaccaaagatactgggctgacaaccagaactttcccgaccctaataaaaaatggtctatttagctacctgctgcacttcagagcaaactcataaagtcggcttacactccaccagctgacgggcccccatacggattttgctctgagggggtagaccaacataggtcagcatacgtcctcacgcccgaatttggattgatcgactcacgcaggagtgtgtagatcaggctgatcgtctgcagggtcttccctaaacccatctcgtcggccaggatgcaaccagtgccttccatcttcttcattcccataatgcattcgtacatgaactttaacatcgaacaggtgtcagctggtcgcagatgtgacttgacggcacgagtccgtaccttgactccttctcgctgatgcgggcggagcaatgagctcaattgcgggtccactaccacatcgacgatgctcgcattcctggtcaagcgaattcctgtagaatcagcaacaagacatttcatccgagaatgcatgcgacaaacgcagccttacgatttgttgtactttgtagcatgatctcgtgacggtcttttcataaccaatgcgccttcggccttgggatcaaatctgtcgatgcgaagctcggtatcagcgcataggcagtcatttgtcgaagcagatcgaaagactgacttgggctcgccgactttcggtttctgtatgagatgcgcgctctttctcggatctgcgaagaaactggacgcagggacaggttgcttgaagatggactttgctggtttacccaacgtccgagctggtgggggaggtgctgctggggcggatccgtatccgaagcaagtgccatcgagatatctgtacgtcggtgatgcatcagcgaatcgatgcacggaagcttgagaccacggaagccgagactcactgttgagccggaatttcgtggtccacctcgacctaagcgcatatgtattgatagtcaacaacccgaacgacgatatagctcaaagaaggggctgacctcttttccaccgaccctgagctcgacacccgaactcagtctgcctgcggtatagctagccgaagcgatactattgcgagcgcccgagtataagccgagcagcccgacaatgaggagcaaccttcggacagcttactctttcccatccatgtctttcatgaagcatttgttccctctgatcaccaagaccccgtcaccatcccatgtttctggaaaaaggcattgataccgtcaggaaacctcgatcaggaggattaagagctgatctagaggactgactgtgctgtataccgaacatcgaggaagtcgagcgattcgttatcagcttcgtgaagagatagtcgtcagctccagaatcactgcaccttttctgcaagtacaacgagagcctccatcagtcgatgtcgataaggtttaaagaagagacgacattcgactcactcgcttgtggtttccgccttgaggagacagaaagcgggactttcagctgctacgttcttgctataacgctcgaacagcactaaccattgtaccatccaataactctcgtccgaatcgttcgtccttgtgggcttcaagcttctcgacgagcttgctacaggtgacccgtaagatctatttccaggcaacaagctattcatgcccgtcttcttgacccgtgcgacgggttcatccaggaccgagcgatcatcatgttcatcgggcctgatggatggaggagcttcctcatcgtccgagtctggtacgcagtcgtctataggccttctcctggacgccgagttgagtgtagaaggtttcgtaggggtaaagtaaggcgatcgggcggtcgtcgacggtcccggtgctcctggtcgatttgccatcggcgagacgaactttttcgagaactgtggatacatggcgctgagccttgcttctagatcctacctaaaagacctcttccgaagttgtctagatctatgaaatggggcccacaaatggtgacctatatgtcttgtgtacttggagcagatacccactcatgccactcactcgagcatggaccatcatccatccgaacatctcccagaaacctctctgcgagctcgacctgatctgaatgagatgacaaagtaaacaaacgatcgaggcggggggggaacgacgcgagcacgctgctgctgctctcgttacgcgtcgcgcgagcaacaggaagagacttgttgcaagtttggaaagaggcaaagaggtaaaactgttcgtctagttgctatcaagattcaagagctcgcccatcagcgacaccagcagttcaagtagtgccactgtagatcgtcattcatagctcggaaatagcacgctgggactcgttcttcggtcattcttgtaacccgctagacccgtgtgggtgatcttcggctgaatcgacaatcaatcgaaaggacgcgggatctgcggctgtctttcgacggaaaacagcatttcctctgtatcgggcctagctctgtgggcgtgagaaccgtcttcagttcagtcgtccgtatccccgtcgctttcgaggagcaggttcaccaagatggcggctccgaggaacaacctgcaggatcagctcaagctgctgggtgcggggaacaaagtcggcagattgactgggcccttgacacccgcttcacagctcaaggtgagtcgtcgtatggtcgtacacaagaccccttgaacatatggagctgatgttattgcggccgttcagcagactggtagtacgtttcagctcgccaaaattcccggcagccctaaagccttcaagctagctgcacctggtcccccgtcacaagccccaagacccgcctcatcctcgaccactcccgctgcgaccatccggccaaagagcgccatatacactatccacccaaaggcctcttcccttcgcaactcgccagctcctccacggcccgtatctcctgccgcccttgacgacgacatcgagatcattgcgagcgatcgtgaggagacggcccgacctgctcgaccggtggaagctcgagggcggaaacgatactcggaggagcacgaggacggtgcagctagggctcaacgggtcaatcggtcctttgaagacgaggccagtctcaatcctgcgccagcgttggccagctcgggaagagagagccagacaaaggtcacccagctcacgagagacgttctcatggccaacacgaacgggacgcagggcaggcgagaagcgggtacggttccgtctacgagcgggtccgggaacaacaagctccagcacgtacgtcactctgtttctctcgattgcggtgttaccgtctttgggccctcagctcactgattcaggtcttaacatacagctgtcgaccgaaaagctacaagcgatgctcgcgaacaacaaagacgagctcattcgcgtgctacaaaagctcctggacgaggatgccgatagggagatgatcgaaatgcaatcgtgagttgatgaacatgaatttccgcttacaaagagactccgcctcaatgtcatttcttcctggatctgtttcacaggggcatgctcaagaaacgatgtaaagagcttaccgaagcaatcaacaatcgtggacagacctcgagcatggcatcctctgtcatcagctctccctcgcttgccagcaagcagctcaagtttgagcgagctgctgcgccagccgatatttcccaatgggcagcggcggttcagcccaccgacacagtttccgagatggaggaacaatccagtccgacggagcgtgtcgcggctgggcggagcggtaataccggcgaagctacgccgcagcggagattacccatcatgatgcccagccgcatgccgagcaacgaagagcttcatgctagccgccatgccggaccatcccgtgttccacaggcgcaatcccagccccccaagatcatcgcccactctactccccgacgcgacacctatcgtcaagattactctgcacaggcgatcgacattgatgaggacatggacgacgaattcgagatggacgcaacattgttggctcaagtcgctcaagcagaagaagaccagatcgcggccgatgaagtcgcggcgagacgattgcaagaagaatggagtatccagccgccttcggccggaccatcccggcctgcgcctgtctcgcgcacgatctcgatggcaaggtcgagaagccgaacgcccgtacctgctcatgccgagattatcaacatcgaagatgaagccgtgactgcgcgaatacagtcgcgacctcgcgctcagagtcctcctcgggtcattgtcaatcatccttggagcaaggaggtcaatcaaaagctcgagaggatgttcaagctgcccggattcaggcataatcagcgggaggcgattgatgccacactgggcggcaaagatggtgagctacaccattctgtatgctttgggctgagaaacgtcactcatggtcgccctcatttgccttgcttagtgttcgtattgatgccaacaggaggaggcaagagtttatgctgtgagtcctcgcttatacatcgacgtacgataaaatcctcggccgctcatgcgttcatcgggtctggccgtgggtagatcaattgccggctgtttgtgagggaggcaagacaagaggagtcacattcgtggtttcgccacttctgtcattgatcactgatcagtgcgctcatctggcggccaacgggattccagcaatcgcatacaccggcgacctttctgccgccgacaagaggacggcaaacctcgagctctctcggccggaccctacggtcaaggtggtctatattacgccggaaatgctgaaagcgagtacagtaaccaaagatctactccgcggtctttacgatcgtaaaaggctagcgcgcttcgtcatcgatgaagcgcactgtctgagctcttggggccacgactttcgtccagattatcgagctttaggcgaactcaagacggaatatcccgggattcccctgatggcgttgacagcgacagcgaacaaccaagtgcaacaagacgttcgaaacatcttgcatttgcagcaatgcgcattcttcaagcagtccttcaatcgaccgaacctctattacgaggttcgcgacaagcgcgcgaagaacattgtcgccgatatgtacaactacatacagttgcagccgaatggatctaccggtatcgtctatgccaattcacgagatcagtgcgaaaagctcgccgcagatctgcgtaacaaccatggtgttcgagcacatcattatcacgccggattgtccaagcaagatcgaatccaaactcagaccgactggcagcacaatcggttcgacgtcatcgtggcgacgaccgcgttcggaatgggcattgacaaggccgacgtccgctacgtcattcaccaggcattacctcgatcgctcgagggctactatcaggaaaccgggcgtgccggtcgagacggcaaggcgtctcaatgcgtcgtcttctacgcgtactcggacgtgcgaagcgtacttaggcaaatcgaccgggacgatacgctcaactacgagcagaagaacagaaacaaagacgccgttcaggcggtgttacgatactgtatcaacaagaccgactgtcgacgagctcaagttctcgggttctttggcgagtctgcctgtgaatgttacaaaggctgtgatgtctgcctgtcgctcgacaaggacacgcggacatcccgggatgtcaccgagcacgccgtgaacgctatcaaactggtacaagcggtcgatgactctaccactctcaaggcagccacagctttgttccgaggcacaaaggcttccaaggggtccgagaatcccttcttcggcgttggctcggactggagtctaggtgacgccgagaggttgtttgaaaagatgatgatcgagaacctcttcggggagcttcacaagacgaacggcgcgggctatacgaattcttacgtttgcgtaagtccattgcctccccgacagataaagatcgacaagatgctcacacaatcctttgcaggtcggtcgtgatcacaaactctacctgcaggggaagaagcgattcatgatggatttccgggacgaaacaccgaaagtcagcaagacgaaacccaagaccaaaggtgctcaggcggctgcggccaagaaaaagggagccgttttgcgtaacccttctgctcaggacgtatttgccggccaggattactgggattcggatgaagactatcaagacgcaatcgaagagtcgccaaccgtcaccgtgacgacggccaagcgcgtatatcccaagcgtacaccgagcactactaccgggacggcgggcgtcggcgcatcgggtcctcagtcaaagtaagcgatcttataatagacgttggtatccggcatccttcaattgactgatggtctaatgattcatcagccgaattccatccatcgagtacatccgaagtttcaaggcaatgccgactgtatcaccggcagccctccgtcaaacgccattgaccgcggctatgcctggctatattcgcccgacgaccacagcaaagagggtcacgcctcgcttctgaagtcgctctgctataatgataccttgtaacgccctcacgtaacgccctcacgcacttgcgacgaactgaacgaaacgactacagaaggtagtgatgacgaatgcgaaaagatgtcaggcctggacctcggacgagagcgaaccaaccctatagattgtcgagcttgttgccgtgttcaactctgacctctctagctgttgaccgggtaccaaccattagtggtattcggtttcatcacctcaagatggtacttcgagtcggctggcaccgagaacacttcctgtctcctctgctgcagctgcatgcggccaaggatggctttcaagtaaggagtattctgcaagccgcgggtgttcagccactgaaatcgaactgcttgtgcagcttgtcgagtgtcctggaggcacaggcgatatgcaagccaagttaaaagctggagagatcgacgtgtgcatcggtgagtcaggttatgatagatataagtggagcagatctgacgaaatctgcagctctcaccgacgctctcatcgccggcattgccaacggtcaaaccagttacaagatcgtcgggcgttacatctcaaccccacttcgatggtgagtcagcctatctggccacggaaacatgagagatgaaatgaatacggcctcaacagggcgatcatcaccggccaagagagccagtaccaagacgtgagcgatctgaaaggcaccaaactcgggatctcaagactcggcaggtatgcgtctgacacagagtcgctcgtcaaggtgtcaaattgacatgtctgtatggttatcacagtggctcgcaagttatggcttccgtcatggctttgcgggagaaatggtcgcaagcagatcaaccgacgttcgagggtgggtgcctcctcccttgccgttgccctgatttacgagctgatcgaggctcaccgttagtcaaggggagtttcaaacctctgcgagactctgtcaactccggagaaagtaagcacacgcagtggcgggacatggacttgaactctagtttgatctggattccgagctttagccagcgtttttctatgggaatggttcactacgaaaccttacgcggactcgggcgagattcgctttatcggttccgtatacagcaagtaccattgcgcttcgtatctgtacggagatccgatgtctcattctgttctcctttgccctgtcagctccgtggccttgttggatgatcgctgcgtcgcctcaggccgatgcaggggaggtctcgcaattcttgaaggacttgggcgaatacaccactgaattcgattcccagcccaaacgagagtctgaggacgtcgactatgttgccaagacatttggtcagcgcgaagaagatgtcaaagagtggctcggcaccgtcgcttggtaccatgatctgctagctgttgagcgaagcgtagtaaccgaaacactagagtgagctctgaacgaatagcgagatcgtagacctcgctgacgacgggattttatccagggttttggggcaggcgggtgtcgtcaaggcgccttctgaaggttgggaggttgaatcgttcgtcgacgagcgcgtggccaaaataatatagtcgtggatgcaagcgcgatccaggaaatcaagtaaaggcatcttacctgtctagattaggatgtctatacagatcttccgtaatcgaatcctgccacaggaagcctagttgcgaccccgcgaagatatttgtgtcatgatttgatctaaatctgttccagcgcctgaattgattcgctatccttggttatgaggctcgcctatcgcctcgccggattctgacttgaaatgagtgtttgcaggctttattgttttttgggtactatctttgggagcgatacgcaaccgtcagcccgagcccgagcctttacatgaggacatatcgtaaagtcttagcatcatagatgcacttgcagcacatattgcagagcccagtgtagatggagcaagaccattctaagtgtgcatgtcgagcaggacgaccagtacccatcaggccgccagaaatactgaggcgccaaagtaacgtcgacacaaatcgcagaatagtcgtggcacgccacccttcgccctttccgttcgacctgttctaaaaggttgagatgacctcttcatctgcttaactttgtgccttgcatagctcgacggttagtcagcctcgctagagagcgaaaacagcggctacagtcgatatacccaaaaatggcggaagaaggcaagcgcctgcattgcatataagcggacacgaaacgccctgtggcttcttcttagaggtctgctacatcctccacatgtctcgcgcaaaagcctcccggtgttctgcctggttgtctcgagtccaggctgcctagacagggtcgttccgagaaatctcaggtaggccatatgagctgttcaactccccagaggcgccgccgcaccagtcgatcaacattttgccagaagatcttcttttcctcggccgaaatgtagatgtcagtccacgctgatacgtgcttagaaggagcttggaatcgcccttgtgaccgtaaatgagagcataccagaaacataggtcataaaggtcgtgaggtattaagcgcgtacacatcgatcaatcgtcttcgctagcaacttttccgatgcccatccccattctaacgagagtctcaatggcttgagaagaattgttcaaaatgtcctcgtcccatcgcaacttgcccttttcaaaaaggcatacgatagtggaaccacctgtgcgacgcgtgtgatggatcagttccaaattgccgcatttcctgacggacagcgcttaccgaaagcgaaccatcccagctcatctccccgcttaactgaatcaccttctttgactgtcgcaccaatactgccaaccactacgatcacaaacgacgtgagtatggccctcatccgcggcatgtcgctcgacgctcactcattgcaccgatccagaccgtcatcacggtgccaaattgtggtgattgtataggccaaacctctcgcacattttcgccgtaaacatcgagggtcgttcggattgcttgagggttaacggtatagtactgtccctcaatccgagtcggtttcccgatgacaccgtccacagggctatggtatcgatggtaatctggtcgccggaagaatatcagttggcgttccctggaagagatggcactgtgactcaccttgtggcgcaagtctgagggagaccacaaggtagaaccggtcagatacagagccagttgaataaccaagtccctactcaccggaagatgcctagagctcccccttcatacttttgccaatcaccctggtagctgtctccgagcaaccgaccaacgctaaattctttccctttgatccatagtcttgtcgcctcagagacactctcgaaagccatcatccggcagtctgcacacgagaccaaagtcgtgggatcctcaggatgcgtaatcggtcgcgcatctgccttgagacgccgatagaaaaactcgttgaaggtttctgcatgcagaaaggatgatcggctatgggaaggagggatgatgggctaagccggtcgatactcactgaacgaatcgagcggctccttgatctcgtcgacgttgagtttgtgatacgcgacaaaagtcgggatgtctgccttggattcgggcgagttgtatttgatgccttgcttgatactcatagacttcagaagtcgttgtgctgaggggccacatatggtcaacaccctgcacagaccgagaatttccagcagactcacccctggcgccttccattccctttttggcacctttgtataggactcgaatacctattctgacgtacacagccatcttttcctcctgcaattgcccggtcattcgatcttggacgatgatgttggccgagttcgccccgagcgagtaggctccggctgaaactttggtcaagactttggagaagaacttgcgttgggcctgggacgccgtgacatagtttccaacaacaatccgatcgacgcgatcccagtcggccgaagcgcaaaccgcaatatgagtcagaatatctgcttcggactttttcttcagacgagggcgatggcacaggggacatgacttgatgttgatgactcgctctgtctggccacggtggccaacgtcggactcggagtcggacacgtccggtgtagatccaggggagagcgcgtcgtgagcctgaacatgctgtccagcatcgatcccacccgaccgttccatgtggacgggtttgacattgatatcgccattcgggctatcgtcatcgtcacgagtcggtcgactagccttgatatgagcagctaactcgtcagcatcaactccagatggggctcgagcagaaggtccagactcgtcgagaccatcgctggcaggataaggcgccatcgctgggtaggaagaaggagacgccattccagacgggggttccgagcgcaagtgtttcttttcggatgccgacttttttatctcgtcctcgagacaacgaatgatttcgtcaaagctgagttcgtcctgctcgggatccttgtcgaaacgggtgaaatagctctcaagcgtcgaattggtcaaggtcgagttgagcgagtcgagcatggtcgtcaactcggtgaatgaaattgaaccggtattgtcggaatcgaactggagtagatactgcctccagaaccgttgccgcagtgcatcgtagggctcgtattttgccctgtgcaaagcgaaaagcgaggcggaaatgtacatgagtatcacgagcgccgcgcgacatgtatcatccggcactcacctgacatgcaggacgggcgaatgcctgctttcccagccggattctttgggagtcgcgataggaagctgcgaagcagatgagcgatccagtaacagcggataactcaaaccggtccgcatatacgacctacagcaaattccctcatctcatgtttcccgtctacgcgaggaccatacagtccagtctgctcgtcgggtagaggtgcatccttgatcaagtcttgtagagagatggtgctggaacctataaagtcgtttcctgacaccttgtcccagtcgagcacagcgaattgaatattgtagttgtcttcgtaacgtcggacatggaagagcatcttttcgtcccaatttgggttcagtctgccggattgaccctgtgtcaataccactgatagccgacaagaatattacgccggacctactcgtgacggatgacgcgggttcgaaagacctttttcccgaaactgatgacaacgaaagggtccatgtcgaacgtaaatttgagtgctgcgtgtgatttcggatgtgtgcagagtgaacatgacggatataccagacaaacacctgcctcttactcacaattcctcaactttggcaagtccttggcccccgaaatttcgagcatgacgatccctaggacatctttgttgacgccgagattatattcggttcctgcggtccccttccgcctgacctttcgcagcctctttttcagccgactcgcctcggctggcacggtcgaactcggggtcaagagtcctgacccggaactcttttccgagtaggtgctgacgtgactgttatgggctgcgatcaagggatccttgctcggacggcgcttgttcgatttggagccgcctgcagtagaagaaggcagcatcttgtcaaagtaaccgggaggcacttctttggcagcggtcggcgggatctcgacgatgacgggcgccgctgtatcggtgtgaattctcgtcaatccgtgttcgggactggtggagaattgggccatctcgtgctcgtcaattgtgtgcccttgcatcggcgcgatttgaccgccgctcatagacccggtacggtccttgtctgtcatcgagctcaaggtgctcgcggttccccgtctcgtccgatctggaaccaagaatcccatcgagtagacgtccccatcgtccacctcggacgcggtgtcgctcaacccgtcgtcctgcagagcttcttccgatcccgaactcgaaacgtctgaatcgcttgcatcgtctgcatcgtcactgagcgcgagtgtttcgctagcatctccgccatccttttcgttccgaccgcggcgatctttgcggtgaaacagggtcctcgcggccgattgcagggcgctcttggggatggcgcgtttccgacgtcgaggtcgcatcttgacggtacccacgccttcgtactatcgcaacgtggaaaaaggccggtcagtgccgactttcattctcttcaagatcccgcatcctgtctggacgacttacggctggtgccgccaagagactgtctttcaagcgtctcaattcggcatcatcctgaccctctgtcgtcctcgacaatttgcgaacgacctctttcgcccactcttccgtcagaccgagaggcgtctcgccaggaggaggaagaagaccgagttgcaaatgcaccgctcccgagacacgagcgtcacgtcgtttccttctcgtcgaatgcaagtcgtgtgccgtcgactgtttggaaatgaaagtgtgggacgatggattatgagcattcccgggtcggactcccctcgtcgactcgacgactccggtgatttgctcgctcacctccatgttctctttccagaccaacccgccctcttcccactgagccaacctgacgcaaacctcgcccatataatccttcctgacccctccgaaatccctatcccagacgaccacctcgagacctctcccctcgtacatccctgcaccctttcccaagctttcgtacagggggaaatcaaaggtcgatttcccctgctccttttccccctcccaggacgggttgagggatttcttgacgctcggtgtctgtcggttcggcgtcgggggtagggagaggacgaggtaagggtccgagagaccgttgcgatcccgtgaagagagcgaggtcgcacggagtacccggacgcggaggatggcgagcgggggttcattgtcgagcggtttaagggaaggtttgagccgcatcgcatcggccgaggtcgaggtcgaggtggaagtcgaagtgatcggtcgagttggagtcggcatagtcgattcggcaggcggagggaccgatccttccccggtctgtccctccagactgttcctccccgccgctacaccgacctgctcgttgctcacgctcagtcccgatgatgacgggaccgtagtggaagctccttgatgcgccttgttcgagctgaaccctcgtttgatggatccggcgatctggaacggcttgttcagaccagcagaggctaatcgtctgaacgagggtttcgatcctgtcgtcgtcgtcgtcgtggtcggggtagcctgtcctcctccggccatatcgttcgacatcgacatggcgtgctcatgatcgtcgtcgtcaaccgtgtgaccgaccgcagtggtccgatgctgatgatcagggttctgaacggggtcgagcgtcttttccagcacagacgtgagcaggttagacggttcttcccccggttgtcggtcttttctcatcgggctcatgtggttgttatagttggtattgctattcgagttcgagtccaggttggagttgtagttgcagttgggagacattgcggatatgatctctgcaggaggaggataaaggaacgtctcctttcttcttcccgtgaagggatatgcgaggtcctagccgtagctgcgcagccggttcgacagggtccgaggtcgttcgagcgatcccggcgaaacacgacccgggattcgcaggtgatgatggtttgtctcgagctcgtggtcacgattcggctcagtgaaggacactcggatgtcgatagacgtcggaaagtataccgtgtaatgtctgattgggacgtctgtactactgatcacggtcgtcgtcaccaaaatcgaatgcgagactgcgacgccgtgttcgagtctagctatattgcgatagctcgtgaggtcctttccgcgtgatcgtgatcaaacgcgaggggttcagcgattcgtggtggctgatggctctgggcgagatctgctagagtccagtctcacgatcgcaacgagaggtcgttgaaagcaggacaacgggttggggtgtgagagagtggcatatgtatggacgataacatgttcggcaaacgatctggagggatggaaatgtttaatcggtgagtgcgggttgatgatgaatctccctgctcccgggctagttctcggccaccgaggaccgaaagcggctttgggaactacgcaaccagacacgcaaaccacccagagccagacatccgtagtctcgtgttcagcctgccgggaatacattcgaacggtagccgccgttcgtcgcactcagggacattgacagggtcgagattgaaccttgtctctatttatctacgtcttgtgagagaaggtgtccggcataacccactaacctgtgacctacctattctctattcgtcaccacctgacatgtgacgagtcgcgagtcgccgagttgacattttctcgtaatcgactgacaacctaacattcaaattcccgagatatactaattgtttcacgtgactcgttgctgttcatccgttattacgtttcttctgtcaaatcaacaaatttccgcgtcgccccgccggccagccagtgcctgtgacctatatatacaaagcgagtcctcagacccatcaccgcgaaccatctgttgtctttacgccttgtcgtgacaacggtctacacaacatgtaggcctacaacgcccacacccgatcaaatcgtaagtatccattcttttcgcctcgctctcttcgtctcgcaaccccccttccccatccccgctcttcgagacgacgacgacgacgacgacgacgcaccgccccaaacggccacatcctatgatgttttcattttatgttagactctgaccgggaggacctttcagccttcgtaactggagtaaaaaatagtcaatagtccctacggggtaactgatcgatatggccacgggcaatcgtcgtcgtcatcgtcttcatcgtcttcggatggtgtcctctttcagggaggggaatctttgttgtcatcgggtttccctatggataggatgctgactcgcacctcgatctcgatcatgctcgctcgctctagatccatcccttctttatggaattggtacgataggtcgacggggaacaggaggattgtataagcccagggacgtagactttgcaacttggcttagaccgtacagtctcctccctggcccggccctccctccccctttcgacccatggggaaaggagggtaaggtgccattccgggagggggcatgaacatgggagggctacgaaaggggcgggcagcatatgcgggtgagcttctagtggcgattcacagacacgcgaaaggcttaccctgccgggatcatgcttggaggcggcatgctgcatcccaaaaaggcgtgcgcgatcagctttctacaccacctatcgcgttgagtcggacgactcaccctggtagtcctcccataggcattcccggcatcatccctagctttcctccgctcatcaacatcttgtgctgctcgagtgccatcttcagatcgtcctctccaatgaccccgtgatagatcttgggtcgcttgttcgggttctgctgttgactcaggttgacaccgaattcggcttccttcttggacctccactcgtccttgtctttggccggtacaccttccattccaaagatctctacgtcgtacccatcacgtccaggcaaagtgttctccaacctgcgttccgtcatgggttagtcgaccttgctcaggagatttgcacgtctagtgcagtggagagacagagtgtgtgtgtatgggttggacttacttgtcgggctcagtcttgtgtacctgctgacaatgcaccatcagacctccggccgtgttcaactttcttggacagtgacgacatttaaagtgcttggccttttgatgttgcaagaggactgttcggtaaggccgcgctttcagtcggggagcgaggcagagcactgtagtaatccgtcgcggagactcacccttctcgtcttcaaactccctctcacagtaccaacaccacggtttgagggtctatagttgcggcaaagagaatgagcctcttgcatcagcgccggcgtacagcggaccgccagtacttttgcgcgaatgtggacttacgaactgagtcttcttggacttctttttagccatctttgggaattgacagagaagtaagctgagtgttatgaaccgagagtaagttggcggtctaacgatacgacatcatgccaagtggttacaataaccaagtttagacgaacgctcgatcccagcaaaggggtgagggggaggttgattgaccatttgagctaagactcaacgcgcttttcacagcgagcgagtgagacgggggagggcaagtgacgatctcgatatcgcacagagtccagtagaaagtgtacagagtagattattaccaaacacttgacaagtatgcctctcttgaccccgagtcacatacaccaataatcaatccatcgattacgggacctcgggaacgccaagatagctgcttggtagaatgtcgtcgactccggttcgaccgctcaagcgagctgccgaaacacctacgactgagcaacaacgcagaccgccggcattccagacaccttctcggacgcccggtacgctcggtcgcggtcctcgaagtcgctatagagatcagacacctacattaggttcacctcggacaccccttgcgaggagcttgatcgctcctggcaggcatagggacgttggcacgagcgctctacgcagggagtactcggtggatcgatcggtagcgtccactcagtatgatcatcaagactatcccgaggaagaagagcttcgcgatttccagcaagacacggtactcgaagccttcaaggggttgccttctgggacggtattagcgagagatatattccagcaggcgttcgtgcaaggcagcgtccccgatgaagttagacacgtcctgtccgatgcaggtgaggaggacgagctctgcacgaaagctggcatgcctactgaacacaatggatatgcatctagattttgccaatgaccggtacagagctgtcattgattctcttaccggtttcgcggctgtctcgacgcctcaagaggtctttgcatggaattatgccaaggtgaggacatgcgggaacaacacttgctaccgtagcgatagctcaactaccgtctactcgcctcagaaaacgttcgcttcgcctacgtgttataccttccatcccgagactcccacaccctttgtcgcctttattccctctcaagtaccccagacgcgggaacccggtatcgtcctcgtcgattcggttgcaccggaaagcaatggaggaagcggagagattctgttctttgataacgtcacgctggcgttgaccggtgctcagccgatcaggggccgactaggactcaaggagggagaagcgatctcggggctggatcgagtcgatgtgagcgggctcatacgatggtagatcgcgggttaccggtcagctgatttcaacctctggacctcgtgcttcaaggctaccacgcttctcatgtcaactaggcaagctcgagtgcttcgacaaacgatcagtagcaacaacggtcgaccgctcttgaacttgccaacgccgttcatcaagcccaataatacctggctctcccgatcatccgacgtattgttcagtgggaacgaccagaacgagggcgtcctcggcttatcgatcggcaaggaggacattgatacatcgctgtcttcctcgatcgggtcaggcctcggcgtgagcatgttcatgggaacccctcgtgcgcgatctcgaggcttggattcaaacgtcgctctgagcggaatcggaatgaagcgggaaatttgggtaatgggagccagcacggcttccggttggagtctcaccagtacggacgtcaaattcttgaaagagctcgtcatcctgcccgaggtccagtcgcatgcggatatggccgacacgtccgatatcaagctgaaggacgtggcgacgctggaccacgggaatatcgccgtgttggtgtcgttctcaattcgacctgtagatcgggtagccaagaccgttggaccgacatgttatgcgatcgcgatcgtcaacccttcaaaggaacagggagaattgatcgagcactttatcagactgagttataccgccgtgcgttgaaaccgttatgcatatcctggccacagcagctaaaataggtaccctacaggtcgaagatcctcgtccgattgcccggacaagattggtagtcccccaaaaggcaaacgtagccttcgtgcagctgtctgctgcgatcgtaacggtttccctggaaagaggtaatctctcgtttcgcggctccgtcgtcatagaggtgagcgctaaagaaactttgtcgttcacagaatcgctctatcaacaatcgaccgccttcaaagacccggtgcacaatcctatcatcggcgtcgggttcgaccgccagtccgcggcagtccgcagcaagggcaacgagggcaacgtccggctcacagcttttgcgtcgaggagcggcttcatcggcgtcgaggttgatcctgtccaattgttcgagtttcaacctgggtaagtcctgctgtgctgtccgggaggaggaggtagtcttcgttcactgacatgaagaccccacatcaatcgcaatagttcgacagtcctcgctcgccgagccgaattggagaacaagatcgaacaggccgtgtttttcgagggacccgccaatcccttgacattcagtcttccaatctcaaggactgccatgttggagcaagcccttcttgctgtttcggaattgattgtgtcatccagtacgtgcgccgtggcatcgcgatatcctgaaccacccttatgcgagctcgctatacttcgattcacagagtcgacctatttgaccactgaagtcaaagggaacatgcttcgggagaggctgaagcgcctcgatcatctaatccagtttgttcgtcagatgggtcttttagatgacatcagccagcccgttcgtagacagctcgcagaggatgcgacttcactcgcggtcggggtagatctatcagagatgctctccgactcggcgaggcgatcgtaagttccgtctctgcggattgggcattgacaatccgctcacctcgtcatgccttgttagcgaatggggaaggggcactcctgaggacctcctgagactcgcgatcgaagagacggttcaaatgcatggtgtcgtcaacagcagttctctgggtgacgacgttaggggaactttggacgacgtcattaggatggctatggaagaggcagacgaaccgtatggtaacaacgtcaatatcttcttcaacaaacatgtcagtgcacgttgcctgtggtttcgagaccaacgtctggtcgctgagatcttgcatcagatacgcagtatacccgctttgctgcaacgtatgccaaccatcattgacagagaccttcccggtcattcggacggaagcgaaaatgatatgagaggatggtccgccttatacacggcgcaagcgatgcaaatcttcaatgcggcgatgcaacatgcggtcatggaaactcgagagaaaaatgttgagctctatgagttagacgagcaatttgtggacgccaagccaagttacctcatggacaagaagactgtggacaccttgcaatacttctactccaaggcagtcgatctcatagaggaattcacgcatgtctcgagaacctcacacaacgagaatgatatcaagtattcaaattcgggaatgtcacgcttgagggacgctctgcgctctctcgtgataccactgttgtttgctttcgaggagcgagccaaaattgaggcttcgtgagtcaaacactgtcagggtttcgcgcttaccgctgctgatgccggacaatgtcagcttactggaagggaaaccggaccagcgagaaggtctccgatcgaaagatcggctcatccaagatagccaccagacaatcttcccgctcagtacgttgcgcgtgcttgcatccgagcggcacttgggcttgctaacgaccctctgcagtctctttcgattccgatctcgcttatcgagtggcggagctcttcgagcggcattacacccttgtccagctagcagtacacccggaagtgggatcgcaggaaaagatcgacgcatacatgagcggagagttcgggcgtcaagagctaagcacggagctggggtatcgtttctcgcaagagctcttcaagcactatctcgccgaacgtgagcgcgttcaaggtttgacttgctgtcgcctgctgactgatatgattcccgtggcagagcaataccgtgcgatactcagctactcgaacgaatattacaaggctgtttccgactttttgagacggaatgaacggcacgacttggcttgggtgcaattcctggaaaccggagatatgcaagaggctggagaggcggccttcaaggcgggaactatggcacagttggctcaaagtcagaagatcctgctcagcgttgtgaagcttactcaagcggcgaaaaaggcgaagggaaagcgaacagacgagggcaagctcgggtgtaggtacacctaacccgcaatgcgagagccctgctgatatgttgtcacctacagattgcgacaaacaactttcgcttctcaagaccatggaattgcagaggtcacggatacgtaaatctggagcgtccgataatgtcaagcgcacagcgcaatcgttcatagctggccgagcggctcgactagctaagaatgggttcacgtccttggagaaggtgaatcagacccgaacatcgtgagattgcaacgctaaaatccagggccttgtcttgttccttgttcagtactgttacgagaaggcagtcgcaatgctggaaggtcgaataatcgatcgagaatcgttgattgatcttctgactgtcaaggacgtcaagtctgccgaagacgttggcgatttcgtctcggctttgaaggtgttgcgagactggcaacaagaagaggtgagttctggcgcatggaacgaaacagctcgatggatcctaatgaaaacgatcgagcagccttctgccgtcaggcgtcagtcgacgtgtttgcggactatctggaggcgtttatatctggtcgacgagtgagccataagcttgagaagcctcgaaagttggcgctatcagctaacgctggtccttcgcgatagctggagcgtgctaatggatccaacagagaccgaggcagctaaacaatcatggctagggcgaaccagattactgcaggtgctgacattgatgcggggagaacgtgagtcctggatgtcgtggctaatattaatcgacgcagctaagggatcgatcattgatagtctcgagccagttcattgtctcacccaaggcggcaactcaacttcctactgaagaagaaactcgcattcgattcgctacggccgatgcagccgaccaagatggccttttcagagacttgcaagaggaggctgcgatgctgggagaacaggaaggtctgacggaaggcgtactcagcgacctgaccgccaaagctgtcaattttcagacggtttgattcattcgatacgactgtatatactaccttgatgctcttcacgaaccattaacgatgtcccgcacctctcctgcccctgtcatgaacgttattactcatcaagttggcttacgtaatttgaaactaacgcatcatcatcgcttcgatccccgaatgaatgtgcgatgatgatgcgaagcttgtagcattcgatgaagcctcaacaccgtttacaattcggcaacactcagcacccttgtctaaagttggcacgccctcggactatagatccaatagcgtatcgaaactgcagcaatcccagaccagacctccgaattttaccctgctagcgctcatctgttgcagtattcaggaccctcccgatcgacctaaagcagaccttttaagaccatctgggcagtagtcaacatgaaccacggaaactacgatggtacgttgtctgactactcaaacgaatcattactgtctcaaccttacttagcgatgccctgcgtcaatagatgatgaggaggaggacgacttctccttcaccggtgcgttcggtggaccccctgctcgacagcaaggttccgccgcgaatccccaattcgctcggggcggaatcttgtcccaattgatgggaggaatgggaaactctggattcggagggtatccagggatgactgctggtggtatgatgggttacggagctcctagtcgaccatcgtgagctggatgattcgacccgccgagtctgcggcaaatctgatcttgatatccttatcagcgcgttcgacgattactacaaagccttctccgtggcattccttcccggtcctgagagacctacgctggcttatggaggaaaaggtagagaaggcacagggtaactattttcaggtagcaatcgctaacttacgacctttcgctccagtcataatgccaccttccgcattagccaagctcagtgagtttttgctagcatcgtgtgttacaaacagtatgaggctgaaattgatcgttttcacgtagcaaacctcgatattgctggaccatggaccttccagctgcgcaatcccaagaacccttctgaattgtgcacgcatggtggtgttctagagttcattgccgatgagggatgtgtatatctacccgcttgggtgagttacacgaacgagataagaagacagtgatgatctgtctgacaccggatccgtcatgtttgatagatgatgaaaaggctcaagcttgaagagggggagcctatccgcttgacaggcacgacactgcccaaggggaagctagttaagattcaagctcaaacaccggactttgtcgaggtatccgatcccaaggcagtgtgagtggttatagcttgctcacgctcatctagtcttcaccgaactcaaatcgtatccatcaggctggagacggcattgcggtcatactcggcccttaccaagaatgacattatcgagatcgagtacaacatgattcactttgaactattaatcatggagacaaatccggagggaagcggtatcagtgtcattgacaccgatttggaggtgcggttgtccgaattgcagcaactcacactgctttactgaaacgcatcatttttcgatcgtgctaggttgatttcgagcgacctaagggatacgtcacccccaagcgagcccccgttgctcttcctcccaccatggcggacaagctcaagatcgacgtcaacgaacaagtctcttcttctggcgctcctactcgaccgggatcagtggcttcaagcaaggctggcactgcagcaggatccctgacggccgaaagcgcattcgagagcttcaaggggatgggctcatcgctcaacgggaggaggacaaaggggaaaggaaagaagaaggagatccaggacgtcgatcgagatagcaagattttcaggaccgagtgagtgactgattcacgacctgatggcaggtagttctgaggattgacctgggcctgttcgcagcaaatcccgattcgtcactaacgagacgttggcgaatgaagagaggaaggtcccagcacctcttgtgcttccctttggaaagctcttcttcggctacacatacaagccatatgacccttccaaggatacgaagaaggtcgagccggaagacggagcagaagtgagcctactcatctgccacaagatttcaatcgcctttcattttgactgatacggattcgatttgcaggcccagcctcgtccatctttcgctggagctggtagcaatctgtctggaagaggcagtcgcggaccaggagcggcgtctggtcagatccccgacgcgccaaaggtcacccaggaggagagcaaaccggatccttgggcgcatctttcaggcggttcgagcttgaatcgcccatcgggaggcacagcaatccagccgatcgaagtcgatgatgacgatgacgaggatgaatacgccgctgtcgattcgggatccgagttcaatgggttcgaagaggacgatgatgccatcctgatcgattcggattgaacgtcacagtgatcttgagtgagagagtttcctcgcccgtaggaaagctcgtaccgtgttcgctctcggaagtatgtctgtatccctatactgcaccacacatgccatatgaaacatagtctacccataaagggtcgccattgacattctgtttcgctccatatggtgaagttgacagtagagtgtttgaacaactgggtcgaacgttaaacggaagcaaatagaaaagtgtggaggtccagcttcccaggttgcgaatgcaatctgctttttgttgtatcatgatgcatcaagacgatcaagaagcaggtcaaacagctggagattgggcagttcatccctcacgaaagttcagcaggtatcgatcagatagcgattggaaacattggtgagtcgtgtgtcacttgtcaaacgagactgatggtaggcttatatagcaacctgttcgcgacgtgatctttgatcaggccatcccgacctttgccatggtcgccagtaacgaaaagaagcggaaacgcaaggagcagaagtcctctgaggtggtcgaaactcaaaacggctctactgaaaaggtggacaagctcaagaagaagcgcaaaacggagcgacctccggatacgacggctgcatctcagctctcccttgattcagacaagcaggaacggaaggaggcccgagctgagaagcgacgacgcaaagaggccagagcggagaggagacgactggaagaagataaaaaggccaggagagaagcagaagttgcctctagcgcttctgcgactggcgatgtgattcgcaagaagaagcaggcgatagacgcagcgggtgtcagacctggagccgaccaggatgcaccatcaggtacagccacatccttcgctacgagtcagggaatagaggctactactactctcgagaggccgtcccagccttccaagaagtcaaagaaacacggcaaagaccgacgaccaaacgctgccgtagctccaagccaatcttcctctcatacgcagatcgaccaggagacgttgccagcggttccttcggctctgccacaaaatgccagagctagtagttcgactgcaggcttaggttcttcgactggcaaaaggagtaaacctacgaaagaagaaaggcaacggcagctggcttcgatgagcggcgacgagtttctggccacggtgtggctcagtacaggagagatgaaagagatggctgagacagccggtcagtgttttctcaaccgtactcggtacaccaaaactcatcttgcccattcaccaggtcttacctataaagagggtctgtacaccacgactgaaaaaatgcagatcaagaatttcttggagcgataccgagtggtacgtttgtaatcgcacgtctcatcgagtatgcgtccaaaacaattgaccctttctggaatcaggtgcggaatctgaccgaacagcagctcgttgacattatcaatgcaacgggaacaagcgctcgtaggcaattcagcgggttttggaaggatgtcggtgcgtattttcctgagttagcgatcgattggcaatgtgaactcatttagcgtacatacctcgatgttgatcagctatgtctgttcccgggcggcccctcaagtctgttcattcacatgtcaagcgtgcgtacttgccagcgtccaagaaaggaaagtggacaaaggacgaggacgacgagttgagagcgtgagcaaatctgagcctccacaacgactgaaaaggggactgaggtgaagttataatttatcagggcctacatggagcatgggccacagtggaacaaggttggtgaacgagttgatagagctggagtggattgcaaggataggtggcgaaatcatgtggctcactctgaacgtcgccggcatggcaagtctccattctgggtgtcttgtcctcatctttgctaatgtccacaatgtgcttttcaaccataggtcgctggactaaagaagaggccgagcaattgcgacagtatgtcctcgagatggcaatcatctctggccttactttggaagagacggagcgggacgtgccatggcaaaccatctccaccaagatgggcaacacccggggaccaagccagtgtcgtatcaaatggttggttcaaatgtctcggacgaaagcggacgatgccatgctgaaatgtcccttttgatatgattaggactgatgatatgttgccttcgatcatctcccaacggaaagcaaagtggaatgcaagcgattctgtcgaattgtacaaaaggcaagtcgagcaaatatccgcacgatgatacggtacctaacatcctctcttgcagactgattgcgatgaattttcgagaccggtctgaaatcaaatggcacactctgcctagcggggattggaatgcaaagagtggccatgtctgtcaaattcaatttcacacgcagttgaaagccatgccagagctaaaggacatgccactgcagggtaagaacgtctggtcgccaagacctcttgcgctacttggctgacccgctcacgataccgttcagatttactgccggtactcctgactgaggcacggaagagggaaaaggaggaagccgaacgccttaatgaaaggactcgaacggcacttgagcaggcgaagtctacttccgcccccaccttggcgggtgccctcgcactgcaatctcgatacaaatctaaagcgattatagacgattctgaccccgatgcgacagacgatgaggcatagacgaaagacagcttgcatatgtgccggacatccaaacgtgattgtagccgccgccgtcgcacctgtcgccgagaagcgaatcgcttgtagatactataaacttacgaaccttgacacgccatctacatgattttacgggatgtatgaaatcagatccacttggtacgcgatcatgcaagtctgttgttacatgcggccagaaggtatacaatcgttgcgtaatgtgaaaggacgttccctccgttacgtccacgggttatcgtcgatgtcttgcaagctagcgagtactttgggcgcttctacttcacgcacgatatcgtcctcctcgactttgcgctgggcctcgataccgtcccttttttgatcctccgggctcttgccgagatgagatccgtctcgatctccctctccctcgctgtccgagctggtctctccggcaacatacacgtgccggatcacgtgcgcgttgggctcgcccttctgcctttcgtgtttctgagcttccattacggcctcctggtcgtccacgatgaggtcaatcgcatcgctaggcatgggtcggtcagacgccttgactggttcgtcctcttctggatcagaggcatcgtcgccctcgccgagctcaaagggtgacctgggaggggtgaggtggtgatgcgcgccggggctatgggcgcgatttcgatcaccttttcgagtcacgcgtaagtgattgccgtcatcctgctccggcttccagccagaaggtcgttcagtgtcgccgtcatacaaccaatcgtcattggcgtcgtcggctccatcgagtctgacgtccgacaatttcgttggagaccgcttgttcttatcgccagtcttctggctttggcgcacggacgatgtgatagaggaggaagatccagctcgatccagagcagctccgttcgcccctataacagaggtagacggttgctgtcaaatcagtagaatgctcacaataaatacgaggggcagagcgcactacgtacactttccgtacacgccacgcttcttcttgtcctgtttcgatttggcggtggctctgacaccagggcgactgcttgacccgccttcgtcactgtcactgtcgttgccgttatgctcgtggcccaagagacgttctcctgcatcgtgcgccttgcgcatccatttcccagcaaggacaccgtcctcttcctcccaaagcttttgtctagccttctctcggctgacgtcgacatttgggtacccgatatactcaatcttctttgctcgagagtacatcgactcttcccactgatcgtccggtcctgcgccctcaaagtcgagactcggggcctcggaagaatcggtatcactatcgtaaggtctagcttccgggtgatgcaggatcctggccgtctgtttaggcaagagaggcgcatacgcctcccgttcggccaacctgctctccaagttgcgcctcatggtattgatcggaccgccttcgcgaacccgaccctcatcgccaggttgttggatccagtacttttgcgtgccacccttgctgtaacgcagtcccgctcggatacgtcgcatccttccgtcgccgacgtgcaagacaccctcggccggttcatatgcctggtacgagacccctcggcccttgagggtcgctttcgaatcttcccatacgtcacgggtgccaaacgcgtccctcagcgcgtaaaagaatggcatccgtgcctgttcatgtacaggtcgtgggagatcaacgattactgttcgtaagtgcggtccgggaccaagactctggagctcacgcagtggatcaaggtttcatcgatgtaatcgcttgcctggaaagcgtattgctagtggacccaggcttgatatcagcgggcgtcccctcgactgatgtacagcaagaaattcccgtggctcacatgtgcgatcgcaaagaagggcatctcgatgcagacgagcgagtcggtcaatgccaaggacatgtgttccctatcggtatacgctccgactattcatgcgcgcaaagatgttagcaaggaggacacggtggatacccgtcttgaccggctcacgtcgcttgatggcgtggatggcgaccaagagcgatacgccgagaccttgccagaaggagaagaacaggatacccttgacacagaggaatttggctgggggagggaggcgtgtgagcgtcggtacgattagtgtctgcatggtatcgctcctcgggtttcgtatgcgcttacgaagaggcctatggatgttgaacaagcggcttcaatgagggagtgctcgagacgacacctaggacgtgcgcgagctcacctgaaaggcttcagatccgtgctgacgcagacccaaaacatggccaaacagctgcgaaaaaaaacacacccccaggcaccatctcagttcccgcacccctggaccgtctctcgccgggtgaggttgggaactcactagagactcaggcagatactaccattgtacacgacgctgacataggtatacccggaatcgaaagcaaagtctccttctcgataagtgttggtgactttgaggatgacggtggccaggacgaggatcggtttgacctggacgtattctgcgagcgggggacgattgtgatatcagctgaggaacgatcgcgtgcccccccctctctctaccgcacccggccgactcacgcaggatgcctcgtttcagattgagaaggacccaaggatcactgatatccatgggtttcagaaagatgttgaatgggaatggatgcgggatgggttgtcttccgtgcaagaggatcaacagggatcgttctcctccgaggtacgagacgagtagctggaagaagcagtagatgacgaatgcctgtacgggtcgaacgggagggggcggacatgagaggagtagagcggtgagtgacttcggggtggacttgcctcgtataggtccctgacggtatcgatgaaaaaggcggcgtcgagggagaagagggcgataagggaggcgatggcgtacagcgggaccctgcagcatcacgatccgtatcgtcccctcagcgtcacgtttgcgacaacgaccccgattcgaaactgctcacatgagcatgatcctgaccaccgagcgctgtagcaatggccttcggtagctcttgagctggaggtagattgaccatatcgagacgacggtcgctatcgtggacaaaagcaacaaacgtcattggcagtccctcacgggcgacgacccccctcgatggacctaccgatacccgaacagactccgcatacgatcaagagagatttaggcaagagatttcccgcaccgctcccgacgtcatgtcccgaggacgacgattcgtacgaaccagacttgtgcgaatgatgtggggcggacggggtcgggtctttggggaacgagggtaacgacatcgttgagatgagcgttcccggtcgtggctaggcgggtcgatcttgcgtgagcgctggtcctggataaggctgctgttcgagttcaatgtcgttggcgtccttgttgagagagagagagagagagagagagagagagaacgagagagcaaagcagattcaagtacctaactactcttgtgatcccgaggtcgatcgacgtctctcgcgcgatgaacgctatgacgacgacgacgacgaggacgacgacgaggttcgaacccgggcaatagtctacaacgtcctttgttcccgataggtcaccttggcacttagataaacgcactcgcacatgattggtatctaaacacgcttcaagggtacgacaagctgaccatgcaaacatatatgtgtaagagaagaaacattcaagggcaccatcctatacaccccactccgcaaacgagccaaaactaacgcaatcccgacggtgacctcgttcgaggatcggcgtcttgccaggacgatgtgctactactcccttgctcgggtgacgtcctcttgcccggatctagctcgtcccggtatccacctgcggacgccatgggtcgaccatcatcgccctcctcatcatcgcccaagaaatcgtcgtggtacttgagcgcggccgtttccccacgcctgccaccacgatcatcctcgcgttcgtcgtcctcgtcatcgtcctcatcctctgtcaggtcgttctcggcaaaggcgtcgtacaggtccttgttgcccggtcccgccgtcccacgcttgttgttcctgttcgaacccaagacgcccatgggtacctcttccgcaacgggtgcgtactgtccgcgttcgacggagaggtcctgcatcatcttttgcttgcgcctgaccctcatgaaccaaaaggcccctcccgcggcgatgacggccaagaggaagattcctccaccgccggccaaccacgtcttgtgttccttgacgacgtgcacgcccgagtcgtaccaactctgcttgtctgaaccgtaatcgatactgccatcctcattgacgacgtcctcgtccgctccgggaccggtagcgacgtcgggcccggatgtgggtctcgtactgctcagacctggctcatgagcctcaccctcggcgctcccatgatcgtccgggagatgatccgtcggtttaggcttttgggagacggtcccgctcggcttggacccgatctgttcttcgtcggattcgcccgactcggcgggactccaatgcttggccttggccgggtcgacgacctcgccccagagctgtagactccaactcttaaagtatcccaccttgtctgggttgacctggtccttgacgcggatcttccagattcctaccggatcctcgcccctgaagacgagagggaaacgaagggacgaaaacgatcaatttcccctctcgtcgaccgtgcgggccggagagcgaccactcaccaatgtttcatcgacatgaacttccacccttgcaacccgttgggatcctcgtcaaacctcctctgtcgggccaagacgctggaaacgccgttcggactggtcaactcgacctcgacgtcgcccctacgctgatgatcgatccagacccggacagtgacgtgttcgagggtctcaaagttgaaatcctcaagcatctgacgggtcacgtcgaatgacgattcgataccgttctcggtgatgagcagaccggcttgaacggccggggtatcgacgacgatcgggtcgtcctcgtccgtcgtctgatccggcgtcgtcgtcgtgggtccctcgttgtcgtcgccttggttgtcagcgtcgccgtcgccgtcgccatcgtcggccatcccgacatcgacaggctctaccttgacgtcctcttgcctctcgtcgacctcgtcgccctggtccccctgctgatcctctgacacgacctgttccctctcgcccaaaaagacggccggcgaatcgaaccacgcctgtggcttgaccagctcccacgtcttggcctcttgaacgaccctcccggcatcgatccgtccgtacccgtacttgtagctgaaccacctccccgcggccgtcttttcccaatccgggtcttccgggttgaaatggaccgccgtgtggatcaagacgtgttggacgtctctccacgagagttccggtctgacctggagggcgagggcgacgactccgcctgcgaggggagcggcggcggacgtgcccccgtgtgacgaggtacaggcacgtttccccacgtcggtcgtatggatatgatccccgctcccggacgaaggggcgacgaccatcattgctgcgcacatctccgaatagtacgggtgtagaccctttctatcgacggccccgatggtcaagctgaagatcgagtttgtgtacccgtcgaaattacactgatcgtccagcccacctccgttcccggcggcgaaaacaaagacgctgcccttgccccctcgacctctctggacgccgttgaccatggccttcaagatcaacccttcgggcgcgtccatgctcttgccatcgtccggtggaccccaagaacaactgtagacgtcgttcttctgaaactcgtaattcagcgcggcggcctcgtcggcgtctgatatcggagccgagaggatccttatccccgagatcttggaacggtaagcgacgccgacgccacagacgtcgttggggatcgccgcgatttcaccggcacatcgggtcccatgttgatcgtccgagagccggggacgggggagaggatcgtgatcgttgaaatcgtacgacccttctgcgtactgatcgggttcacccgttgtaaaagcgggcctagggttagcgttctgaccttgtttgcctgttgcgcgtgtctgtttggggggaccgagggggagactcacgaaattccccgctagatcctcgctgtccatgtccaacccatcatcgatgatcgccaccgtcacccccttgccatcgatcccatcggcccacgcgcccgtgacgttcaattcgacgtcggggagttgcgtgttgacgaggtgccactgggagggtaagagggggtcgacgagcccgagttgcgattggacgaacgtgagctcggtgaggttctccacgggggtaggttgggggtcatgttgacgagcaacaagtagtcctccgggtcctccgggggcaaggtcgatgtattcccgtttgacgcgttgacggatgggtagatggtggacgtctttgatcgtcgatccgctcgagctgtccatcgctgatcgaccttttaaatgctggcccgcagtgcgtctcttccaacgacgaatgacctcgtgttcgtgttcgtgttcgtgttcctgaccatcgacctcgccggtggtaccaccccgcctttcccccaagctcgacgacgacgacgacgacttgacgctacggaccaaccagtgtccctcgagctgaccgatctgttcgacccattccgctcccaactcgctagccagcgctcgagcttggtccaccgaggtatccacgggagtttcgagcgaatagtagtggtgagtttcgtaatctttatgagctgggtaggatggtaatgacgacgaggatgatgaggaggccgtgatcgccgtcgttgccagcggaaggaggagggcgagggaggacaggtggggagaccgcatgatgaacgccggcgggaatatgtgacccggcccgtatcgtcgtagatcaaaggtattgtatgttcggggttattggtcctgggatgttgtctatgactacaattgtgatcgatgtgtacccactcgagtgtgtctgtcccgaccgagattgtctgctgtgaacacgctgcggggatgatcccgaaaacacggacatcatgttgtttttgcttcccatctcgtaattacggcatgctacggcatatcacggacatcgtgtcatcctggcttggcttttcctaggcgagtggctgttcgcgtggcacaaagtggaggttgcggggcgtggaatactggaattctggaatgataaactgtgtaatcgatcaatcgtcatcgcccatctcgcctacatcatccgatcaatctcgatttaacacacacacacacacacacacacacacacacacacacacacacaacgactcttatcttttgacagcaattaccatcgctccatataaccaccaccaccaccaccaccaccacctactcactaccgctcaacatactctcactcctccgctcacctaccctcctcaagagtccatatcgactcgcccaccgtaccttcacctcctccactaccgcacgtatactcgggacagacacctcgtcgtcaatcatgggcaaagagagcgtctgtatcgtcggaagcggcaactggcgagtctcatcgtggctctctcagcgtcgcacgttgcactaacatttcgtgatctggtcacccacaggggctcggcgataagcaagatcgccggacggaacatcctcgcccagcccgaaaacttcgaaaagagactgcccatgtgggtattcgaagagaccctcgacgaggaacacggaggtggcaagttgacagaggtgatcaacgacaagcacgagaatgtcaaatagtgagtttcagcgtccccaaggtccgagatccatcctgctttccgctcgagtatgtgcacgggaatcctcatctcgcctttcttcgacgtacccgtgtatagtttgcccggggtcgccttgcccgagaacgtggtcgccgtccccgacgtgattgaagctatcaagggagccacctacctcgtctttgtcctgccacaccagtgtaagtcccccaccctccgcttcccctctccatcagggtccaaacgccgaggtgtcagcagctatacgagctgactcgacttgggctttgtgatcgtgtcatctgggaaccaactgtaatggacatcggacgttgggtcagtcctcggcaagacgatcgagcagctcaagggacacatacagccgggtacaaaagggttgacgttgatcaaggtcagtccgtcggtccgatcgtcctcccttatactcaccggcctgttaattgacatctcctcgattgatccttcggcctaaatccagggtgtggacgtcaacaaggacaagatccagatctacgccgacctgatcgaacaagaattgggaatcagttgtagttcactctcaggagccaacattgccaacgaaggtacgtcctctgttctatccagaatatctatctgtcaccactggctgatgctccatacctgccggtctcgccatgtgtggcttacgtagtcgcacaagaaaagttctccgagacgacgatcgggtacaggaacgaggaggaaggtcggatgtggaaatccatcctcggtaagtcgacctcacccccgactctctcaatgccaacaaacatcacatgcgctacgggatactcatcaggtctcacgtcttttgtggatcccccgcgtacagattcggaaaaattcaaggtcagcttgatcgaggacgtcgcgggagtctcgttatgcggggccttgaagagtgagtcatgcccaggttgacgatgccaacgccgacacgagtccgaactaacacgtcgctcgcagacatcgtcgccgtggccgctggatttattgacggtctcgaatggggtgacaatgccaagggtgagtacagtaccgtctcgtctcgcgccgcgctatacctaggggaacgctaaccaacgctcatttccttcccagccgccatcatgcggatcggactggtcgagatgaaaaactttgggctcgaattctttgaaaacgtcaagtcggccacctttttggaagagtcggccggtgtggcggatctcatgacgagttgtatgggaggcaggaaccgcaaggtcgccgaagcgtttgcgaggacaggcaaatcgtttgacgagctcgagaaagaattgctcggcgggcagagtgagtctcccggatacgctcctcgtgccaagcggacgctgacgcttctcatcgtccgtcacgacgcagagcttcaaggtgccgcaaccgccaaggaaatcaacacgttcctcaagtcaaagaaccgagtcgacgcttaccccttgttcaaagccgtctacgagatcgcttatgaagggcgggacgtcgaaacggtcgtaaagggggtctccaagtcaaagctatgaacgtgaccgcaatcaagggggcccgctcgggcgttacgatcgtaaaagtagtaaaaagcatgggatatcgttttgcattcgccgcagtcgtctagttgttgtctcatgaaaagaaaatagatgtcgtcgttcagggtgtctgtctctaggtcattcgatttgttcgtcctcggaaaggcgcaacctgtgctttttcttttgccggtgcctgcattcgctccgctcgttacaccttgacagccttccaaaagctggcgtacatgttgacacggtcgatggcaactccggtttgcctgacatcgataggttcgacctcgaaaccggcgagctcgaaccgttgtcggtaccatggatacttgccggccgaccgccagacggccatacctcccgatttgagcacacgtttcatctcgaggatctcgtgatcgagttcactatgtaaactctcgagtgcctcttctgggctggtatcggtcgcctttttgtatcggtcctcaggcatcggtttggaagggtcgatccggtcaaaccagtcgagcgagtccatcacgataatcttggtgagggatccatcgccgaggccagacaagacgttcaggatcgtgtcggtgtggagacggatgttttgcgtctttgcgccggaccgggacttgagcgcgttgaatccttcgggagtgaggtacagggggcatgaggagcgagtataacgtccattcagacactgcaatcgacacctttcataagacgagaatcacgatagcgagcggtcggatgatcaactcaccaagaaatagtggtacgctccgttctagcaagggattgaactgtcagcatctggcatatgcattactcgacttgttatcacgctcaccttgaaagtggcgagaccgggaaggggatcaaaagtgccagcgataaaggacgagatgtcgccgtcctcgagtagaactgaaagctgattgcgcggaacgccgagagcgttccaacagaacacactgagagagttttaggtcgactcagccttgagctccttcactcgcatagaccgggtacgacttacggtgaggcaaggaccgtgcgcatgatcgggttcagcagcacccaacggagtttcgacgcccatattttctgctgttcaacggtcgaatccgcgctgatgaatcgctgcacatctttttgtacgcccatcacttggaacgcgaaatttgccaagcgcaaggcccagccagagtatccttgcaaaaaccagtccgtcgtaaattgataagcgtttcccttccagtatgcgtaggccccgctgttcaagttacgtcacatatatgatgagccgccaagtcttcaatgtgctcgagattctcgtcgacctacgaggacagatagggtgatattttggtgtcaagaagtcgttcaaattcggggtgacaaccttgcccgaatatcttccagaagtcaccatagtcgagggccttgatcgccgcgagcttcagctcgaggatgttaccttggcagctggaagtttggatgaattagaccgaggcgccgagatgagaattgggcagggtacttacggattcatatcgacagaatgcacttcgacctgagctttgattgcgtagtgcaggacattgtctccggcgctagtgatacatagtatcgaatcgccatcttgtatcttcaacttttcgacgtcgacggcagggtcttcccaggtccagccatagatgtgggctgcgaaggtgtctggaggttagacgggccggttctatccgacagtactgtctacttactacgaaactccttgtgcacttcctgctcctcgtagggcagacgccacttttcgttgaccgtcacatcagcttcagaaaagtgttccgccaggctcatcccaactcactgcagattgtgatctctgcttgactacctctcgcgtgatgatcgaatgttgagcagcgtcatccaatgcgctcgcacccaagctaaattcagcaagatcggtcgcatcctcctgagagttggccttttgccaaggcgagtttggggtgagaagaccgtgctctaatcgaaaatttgcgggttgcgaggacaaagttgctgtaggcaccggttcttgacgtttgtcgccgaggtagatataataaggtatctgaatcaaccagggcacgataaactcgtttcgagcataatgggattttcgaccagcgaatcggtactgcaggtattctgtagagcggtctcggaataagtatcagagagatagccccgtcatttgcaatgtgactgacccattcgctctggcttgaggtgaacatggtcgaatgagaaccatgttgtccaaaaccatgtaccaaaaattccggtgtccaggttgagatcactgatgtgcggattctgatgcggtacgtctcagtataggtcctttccctcgattggggaccttcataccttggtcttgcagcgttttgcgtaaaagtccacgacgcccataacacccttggggtcaagcatatcagacattcgatcgagagtggcgtgataagggggaatctgatcgaggaatcgtcagctttcgctcggtgtgccacttgcgaaaaatcgctcgcttaccatggacagagaataactcatggtaatcaaagccgctttgcattgtcgtccgtatttgtcgagaggtagctcgaatttggttgcatcgcaatggaccacgtgcacgttcttccaacgacgctccttgaaccttttacgagctacctccaacaggggctcgcagaggtctaccagatagacggcatcaaaggtagcgatcggcataaattggtccatagtctcaatattgtatcctaacgacctcgaaaagacatgatcagatgaatgccgagtgcaggatcggagcgaattgcaacttaccggtccctcctcccatgtcgacccagatccgcggttgtctcatcaagttgggagaattaggcgtgacttcgtacctggcttttaattcggcagctgccaactgaagcatcgtctctcgtccttttagcaaggcagtccgagtcgcatcgtagatatcggcatggccatgagcatagaacgagtccaggcgctcggattgcgacgatcctttgatgggtttgaaaaagcagcaccatgcgaactggaccaatcgtgagacgttttgagccttatatagaaagaccgctgcgacagagaaaagtatggtcgcaaagcccgcaatgacggggtgctctcccgtaacgccggcaagcttgttgttgggcaaggcgtccatgaagtagtggtcgaagtagcccttttcggatgcgagacctgggagatccataacttcctgtgccggtatcgacatggtagcgtatagttgaggtactctcgacggctaagtctagcgtcgatatcagtgtcgttcggcggatatgcagcataaaggtggtaggcggtattatacttacctgcaagacgagcgactaacagcgcgcggaagcacgagtccagacccaccaggtgtcctagtaaccagagcgcgagtgggtgaccagggcagccggggccgggtccgtccacgaacgccgtccagcgcttggtttctcttgcaacgttcgctagagctccgaggaagccaggacagtcagctttactggccgggcgctatcaatcgctcaaagcggttcaagcattgcgcttctgcgcgtttcaggattagcatccgtaaaatcacccgaacgaacgtgtaaccgtgcgtgcagctcggaacgtgggttgtctctggggccttgtcgtgaacgtgccccgcggctagtccgaccgatcatgatatcagtcttgcgtggccgtcagatcttctgaacgcacgaaagtctctgcttggcgacggagttattgcgttgaaagcatttcgtatccgcgatgtcttgaaagacgctgccacggaggaattgtatagttctagtagctgatcgctgacagctcatttccgaatggcagctgtagccaggtcgtacaatccagcaatacgcgttctgacaccctgtccatacgcaaagttcagaagaccattgaggaatgcccaacttttggtctgagcaggaagtggatagtctggagcgcgatcaaatgcaattagagcctgcttgtcaaaatgtatcgttacaagcgtacccaggggtccaggtatccctgtctggatgagcttgaagaaacggtcttctgacacggccttgatcgagcaaagtgacttcaaaccttccggtccacctatcaagagcaggtaagtatcccatgaaaaacaattgatttcattaccaagcttaccaaatcgaccgaacccgcttgcattcacgcctccgaacggcatggactggttcagataaaagactccgaagctgtggaaaagatgtggttattccggctccgatcataacccgcctgcgttgaccgactcattgatcgcgaccatcccggtcttcatcgccgctgcaacctgacggcattcggtcctatcgttgccgaagaccgccgagccaagaccgtatcgcgtgctgttggcgatggcgaccgcctcttcgatagtatcatagggcatgaccgtcatgaccggggcaaacaattcgtgcttcgcgatgtccatgtcggaatttacatcgacaatcaacgttggctgaaagtagtggccagatttccaaacagggtgaatcaatcgctttcctccagcaagaattgttgctccttgctcaacggcagcggatagtgtcgtttccagctgatcgaacagacgggacgagatcatgcttccacaatcaacggtcggaatctcgccgtctttttgtccaggcgccgaggacaaagagggaccgcaccgcaaagccgctacgcgaggttgcatgatctcgacaaactctttgtacagactcctgtgtacgatgaagcgctcgatcccgatacaattctggccatttgcctggctgtcgacttcaggaatcagtcgaatggcctcgtatcatgaccaggtattgacttacaaggcagcacgcatgtatgtcgaagcgaaaaacttgagattggttgtaggcagtaacaaagcgcaatctttccctccgagctcgatgcaggtaggtatcaactgttcggcagcagcagatgctactttttgcccaacagtctcacttccgatgactgaggttcgatgaagggtatcaatacgctggacattgtcatgattggcgtatgaatgactgacaggtaatatgcttgataagagggtgcctggtgatgatgtccgcgtcctctgggtaacagcaaaccaactagaaaaccgcaagctaccaatatcagtataacacaaggttgagagtcgtgggacaggctcacctgaacggcgtcaggatccatgttgacggcaaccagagtggccttgatcgcgtcgacgatccacttggaactccagtagaccaactcggaacacctaatcatatggttgtcgattgaggtttcggattcggaggtgtcttgtttctaactgactcacttgagaacgacagtgttgcctgtgaacaatgcggcgaggataggcgacaacgcattgtgaattggatagttcctgtgttcacgcagacttcaacagaggtttaaagcaaaatgctgagcaagacgtaccaggatacgatagcacagacgaccccaaggggctcgtaaaacacctgtcaatcatagagcagatgcgcgaatgagggagtcaattatagaggaccgtctctccttggcgcaactgaattgccaaccttggagcgtttgtgggctagcaataggttgccaggacgagactcgggtgcgatggcggcctcaccgtacccgagcaggtagtcgatcttggaaagtaccgtcagaagctcgccaaatgttgcatcgacctctacatttgagagcgtacggggtaaggtccgagtttaatctgaccatagaccgttactcacctgtcttgccagtatccctagctccgaccctgacgcagacatcgcgtgagtacaggtcaagatgtaggccataagtgacaggcgccttacctgacgatgtctctgagattggtcatcatccactttttaaaggtcctcaagaacctgcgcctttcgacaaaagtggtgtgtcgctgtgcaggaaaggcttgatgagccttcttgatcagatccttgagctgttcctgagaaggaagcggcaaagtgtcgatgtgatactgcatggacagaatcggttagactgactctatcgacttgtcacacgataccactcacacccgtcgaaggatcgtatgcggtgatgtacttggtaccgttgtcgtggagcccatgtccggcgggcaggaggctagggtcatccaaatgtgactgtatcgaggggttctcgatgatcctggacgtccaagacgatgatatcgactggtcacgaagagggagtgttcggattaggcttgactgagttaaggaacagatcccatgcgtggacgtacgacgggtatttcgacgtggacagctggtgtcttgcgctcgaggatgtaatcgttaacccatgagatgatagttgggatccacgtagcagcatagaagctgatggcgaacttgatcacatcgaacgtcgaatccaggtatgggttcttgatcggttctagacgcaatagcaagggtttccaatccttgtactggaccgtgacggtatgcgggccttcaaaagaccacatttttccgagcctgtaagaggaagaaacaggaaagagctgattcggaatgaaagcgatgtatggcacacactgtgactggctggagacggttcgtttggactgatcacaaggtgttcatgaatttcgaagtagagcagccttaagctagctagctaagctaaggatcgctcggctttcggaagcgattagcttccggtgatcctctcgacagactccgtaccgcgagagaccaagcgatcaagtaagtgatgtctatcctagctaatcgtgcgcctcagtgcttgccctctcttagccgacgattgacctcatccacgcactgagacatatcgagcagtttgagaaccaagctccgaatcatgtccgccatcgtttctaaaaagctcaagttcaagggtggtgagtctgcctgtttcaaccggcgagcttcttcccattacttaccaaaaggtttcgacatactcccagagaaacccaagaagaagaagagatcccacaaagaggtggaagagggggccttggaagagtcttcaggagaccctaatggtacggtcttttggtcgtgcaagaaaacgtagtcgctgaccctgttgaatcgtcaggttggatctttcctaccgatgccatggagattacgggaccatcatacattctacttccatcgaatcctcctacttgtctggctgtaggcaaactcccatttcaagactctgaaagcatcgcaagggactcataaacctgcatcatagtacgaaccaacgcggcagcgtgtctttgcagcgcctctaaccctgcccgtcgccccagaaggcgaggaggagctcagcttcaacgagatcatggaagtagtagaaccgtcggatatcaaccacgtctgggtcatctcccgtctatcagggtcagaggacgttgtctcccttcggacgagttcgtaagtatcgatgagattcgaatcgggacgcttatattgaatggccgacgtctcaggggtaccttcttgacggccgcaacctcgggtgtgctatcggctttgacaccatcgcgaggacctttggaaggattcgtacctatcctcacggtcggctcctcgattcaccctaccctatccctcaaaacgtcgtcggacaagtacctgtccatctctatcaatacggagaagctgaccctaggaaagcctcagatcgagctgagagcggatgcggacgaggttgggcagatggaaggtctcagaatcaagtgccagcgagactttgtgaacaaagccagggcagacttggcaggaggacccaagggaaagaagcgaaataccgaatctggccgatcagtcgatatcgagggaactctcgaggacgagagggagagaaagtgcgtccgttacgtgccacttcacaaggagatcttggagcgctgacgaccgacctggatttagtgccaagttccaggcgtggaacttgggcaaatcggtggtatcagaggccgatcggcacgaagttaagaaagccaaaaaggacggcagattggccgaagccatgttggacaggcgacagaagcttaaacagtgggtactgggtccggtcgtaaacgccttggtcaggagaacgttgatatttatgcttgacttgtcgttacagtgacaagtattgctaaattacgtatcaagttttgctcgcgtttagaattcaaacctgcatcagtttgatctgagcatttacgagtccggtagatgattccatcgagtagtacgagaatccgacctatcccaaatacgactatgcaatcggggatgtatatcgttgtcgatctgtcgacatggttgaagcccttgatacaccgccgcagctggccgaggatcgttcgagcctggcatcttttccccctcatcgtcacccccgcgcctctgctcttgtgcgtcatcagatactcccgaaccccggactcacctcacagacagccaagaggatgctgcgccctgctctcggtcgctccaggacagttgggttgctggtcgagatcacaagggtttacaaagacactctcaagcggtccgtccgatagtagaaacaaacgaacgctgttaatagtcgaggtccatcctgaaaccgcttcgaaaggctcgtccagggctaaacgaccagctcactctcgcttggaaacgccgaggtcgttgtgttaacggatcgacgacaggccatcaactcgtcgaccagatcgcgttacggtcgaacgtccatcatggccgcataccctcaggttgtatctccacctcccgggatggtcccaggagccatgggatacggctcaatgtctccaccacctatggcgggctacgctcaaggataccctcagcaggcctcgatgggtttcgcaccgatgccaggatacggggtaccgcagggtatgccagcgatggctccgagaaaccctcagcacttttctacacctcctcagcatagtccgatcccaacaggggctactcagcaaaaagggacgttgaggccaggacaggagatcagggtcggcaagcaggtcgtcgtcgtcgagaagtacctcagcgagggtgagtcgatgcagatcaaattagtgaaagtgagtttcaagcgactacatcactaaccccttcgtatggaactcgttccctcgaacaggaggatatgcgcatgtctatttgacacgatcccaaaacccaatcggcctcaacaggttgacgacgcactgtctcaaacgaatagcctttcgagatgatcagggcacggatatgctcaaggagacggaaaaagagattcaggtcatgaaggctctgaaagggaatgaccgaattgtagaatatctggacagcgagatgaaacgtctggagagccggagagagggaggtccgggttgggaggtgttcatcctgatggagttctgtggaggcaagttcacgttacactgggacaaggctgcgagcaagctgattgaggcgatattacgtgcactctgatccggttgtccccaggtggaggaatcattgacctactcaacaagcggctgagggacagattacgcgaggacgaaatcttgacgatattcgcagacgtgtgcgaggcagtcgcacatatgcataccttgtcacaacccctgctgcatcgcgatctcaaggtacgtcctgagctgtgtaacggcgaggccgcgttgagctaacaaagctttatccagatcgagaacatcctttgcacaccggcaactctgtcgaattcgtcgtcgtcgtcatcaatctcttccttccgctacaaattgtgcgatttcggttccacgacttatcccgcttcacacgctccaagatcgaaacgggaagcagaagctctggcgtacgatctaaatagacacactacgctgcagtaccgaagcccagagatggtcgagcccctactagggttgccggtcgggctcccagcgggtgagtcacgaccgaatagagatagaggtcgaatcatagagtactgattcaatgattcgagtgcttcagacgtgtgggcgttaggagtgttgctttacaaactttgctattatacgacacccttcgaggagcacggtccccttgccatcgtaaacgccaaatataccttccccgcatatccagtctattcgcctgttttgcagcatcttatcggtcagtctatgtgcttgtttagtgcacgatcccgtgaaatgtcaagagactgacatgcatacgttttcaaagcctccatgctggtcgaacagccagctagacgaccaacagttgtggacattcttacgcaggtgcatcgattgagaggcactcggcccgaccgagaatacgttagtggagcaagaagactttctcggcttgacaacgcctgctaatcggctggctaaattctcgcagacgaatcctaatgtgaatgtcggctcatccggcaattcaagagcgaccccctcgcctgttccgtctgcgccagcaacaggtaatctactggacttccgctctcaagacgacgtcacgaatttcccaagctcgccaagcagcagtcagaccaacctggcggctacgattcagccacaaaggcggggtcgaccgacgaaggcccctgcaggaggttcgaaccgtgcacctgcggatgacaagcctgcttcctcacaaccggtgccaacctttcgaattcaagtcactggcgatggcggtcagcaacaaacctctgcgacgaagcccaacctcgtcagcgacatcaagcgcttcgctgctgactttggcgattccttcacgcccgacgctggtctaataactcctgctgcggatgcagggaggcaaagtccgctcggttttgatgacggcttcgacggcaaggtcgcctcagcgctacccacatctgagccgctaaccaaggcaaggacaacatcgcccgtcccttctggccccctggcattctctggatttggtgattcgtttgcccctcagagactcgacgagactggccgtcagagcagttccaagaccatctcgctcccggttccctccgaaatgaagagttccactcctgccctatcgccatcctccgagcattctagcgcgttcgaagacaggtacccgtctgtcgagcaactggccgccagagaaggttcgggatccgacaacttgctagtcaagtctcccgagacaatgtcaaaaccgctacgaccgtcctttggtcgacagagcagctcagaagtcaacagccggggcttgtcgttccatcaaccgagcatcaccggcggagcggcagatgaaaaccaaaagatgcgcttgctctccatcgatgaaccgccccatcctcgttcgacgcatgtaactggctccgccttcacctctacaggaggcaagagcccgtccagaaggtcgcaaccaagcttcgacctcctcggcagtatcagcaccgactcgggatcgaccgccgcacctgcacctagcagatctcagtcggcagaagtccggacaggaaccggtttccagcaactgtccgatctcagctcttcgaccgcagcggaggatggtcgacccggggcgcccgtttctgaacaggacctgttgatctcctcgccaaccgcgacggagccactagccgaacgtcagagtagcttaccccgggatctgctgactggggggaacaatggcagctttgatgattacaactacgccgcgttgatgcctgccggacagggtggaggccggaagcctcctcccgtaaacgttaagccagcccgactcggtgctcaaacagcaaacggcgtgccttctcaaggcgcatctgcctccgtcggtggcgaaaaactgtctggctccgcaggcgggcccaaagctagaccattaccgaccaagccggaccatctccgtcgacctcccgcatcaccggccaaggcagggacatcccgcctcccaccttcatcctattcgccagtctctcccggccgagtttccagtccgcccagcatggcgagagatggcccgtctgcgagcgtgggcgactacccagtccgacctgcggctatatcccgtcgcagctcgatcaacgagatggtcgccaagtacgagtccctatcttcccccaagttggagaacgaaggattcgacacgtcggccccgaggacgaggggtcagacggtacccaaacccgcaccgaaacctgttcagcttaaagccggcggtcagggtgtctcgggcgaccagccggacaccggatcgggactcaatcggagtcgatcgatgttcctcccggccgatgcaccgcgacgacgtttgacccccgagatggaccgacctctctcgcggtctgaccgggcgacgaatggggccccggcggtagaagacacggaaggaggtggaaagaagggcgtcaatgcgctcattgcgaaatggaaccaggggacggtgcctgctcaagggacgcacccttctgttgcaaaggctcgagcgcctctaggttcgggacgcagattgtgatgtattgccgttcggcaggatagctctttgatacccttgtatcgtgctcgttttccacctcctatttggtaagaggtccaggtaccaatgtcgtatagtagcatgagtggccaaacagatttcgtcgtgaaaccgataggaacgtacggagaattgacgaacaccgtagtgctctaggtgcctggtttcgcgctagaaaggtaggtgcgcagtcgcctggggtcgagtatgagtactgtagcatagcgatattatcattcaacttcagagaggcgcatggaggagacaggaaggttggtttacaacatttgttcaaatcatgtcagataggatcagatcaaggatcagttgatgtctgatatctgatgagttgaaaacagtggcttttacatcttttgatggagctaagcgagagaggttcggtcgagattatcactcggcccagtcctgacaccgaggtcgtccgagcttgaggtgcatctggatcgtgctggtgttagctagtcaacgtcaaaggtgctggtgaagatgccacctagaccctgatacggtcttaacgatccaacggtttcgtcaatcaccccagggaatttgaccaccatcagaagcacagagtggagcctagccctgtggaggtactcaagcggcatgcaggggatctttcccgtcaaagcgtcggcgtcggtagtgacttcgcaaaacactgtctcgacttcctcttctcccccgactccatcctccaacacgctcaccacacccgaactagatcagtcctcccttttcagttcaccttcgtccaacgggtcggtgcggaagaacaagcgacctccacccgtcaagatccctcaatacgctcattattcaccgccggtcccgaccgtacaggacttttcccggcagtgcatcgtttccaatgacaacgaggacattgcaaccgaggatgaagacattcccatatactttggaggactacccgcccatctatccggtcgtcgacctagcactggcattccgctagatgcgacctatgatcagagcggtttcctctcatcccggtcgagctcgtttggtaactgcctgcctagctcgcctctcccaaagctttccatcgactcgaatcgaaccgaatcgtatcaccatcccctggaacacttcgacgatactgcggataccacccatatcaagggattctacggacctatcgacccgttcgcctcgagcgcgccaacaaccaacaaaattcagcatctcgtcgccgtgactgcgcctatggaaaagatcggtctaggtctgggcctcttctcttcccggcaccgacatgcaacgagagacctgacctcgatcagcctcgacaagggaacaggcaaagctccccgagacattcatccgggaggactatccgtcccgacatccacaccgtcgtcgaaattacgaaaagaaatcggccgagtcggacatcatgcgcgatccaactctgccgattccatgtttaccgtatccgcctatgaagccctaccttcggatacgccgcttcagtatagcgtgtcgaggttcgagaaccagcttggggacgatccagtgttgctcgctcgtcatcgtatgctattgctcgaacccgtctctccgaaaagcatggcccccgaaccgtcccgggttcacgatgccgcctcgtcccggatcgatcccgtcgaattttctccatttgcttcaacccacgccgaagcagggtttttcctctcacaggtggatagctacctcgcccaacataccgaatcacctcatcgcttccgaaaccaaccattgaagccctcttttgggagtcaccaagaggttcctcgagcttcaaagccttcattgatgctcaatacctcgtgtcttttacctgccatacaaattcgaagcgctatcgagagcactgatcgcaagtcgaaccacatgagagatcgctccgtcacaagccagacatttggagccccgctccgccgctctatcgatcaaaataccaccatccaactatctatagaccaggtgagttcaaagcgaggcgctatctagcaatacgcgttcaaagcagcacgatgcgcaggaatcgtttcgccaggtcgagcccgttttcaagtacactcgaacgcgcagcgccaaggcgtttcaagcgcgacccaatggacgacctcatacggcgggtagcgtgagggatacgggcaagcagccttttgccgacaccggatgtatcgagtttcggatggagaagaaggatctgtggccgtatcactattccgtgagtcgggaggtacagaagctcgtgtggggctcgaagctgatggtttcaagcctcaggcgctggagccattgccgaccttgcggaagatctgggtcaacggggatacgcgacataatcaaatcaggcgcaccgcatcgctgggattgcgttcgaacggcgtttaccagatttatggtactcgcgagaagggtgatgtggagtggaagtttgaatacgtcgtcgaagataggcgttcggaagccacgggcaaagtcatttcaggggagagggtgagaagtatcgtgaatccgcgtctcaattcggcgaacacatcgactgataccgaaacgacagattgttatgcccttgacattctcctgcacgcccgactttctcgatgggtcgcaagccgtacggattggactcgtcaacaaggtcaggaggacggtcaccccgcctgtgaatgcgcaccgggtcccgccacccagcttgagcgcgacgtcgagcgatcagtcaacttcgcaacaaggccggaagacgccgctgttttctttttctaggacggattcttctcattcgactgatcaggcctcgcccaacaagcgcgatagtccccgagacgtcacgcgaccgcttcgatccaaaatctccgcttcattgcttcctttttcgggcaggaccaagagaccctcgaccgcgcaaccccgcgtgccttgttccagcccactctcgccacttgccacgagtgtctctgtaggcgctctcggccacggtcaaaggctcgagccgagtcggactcgggatagcatctgccccatgtcggctgggacatccttcatctcgctcgacaccgagaccaaaccgttgcttcccagccaaagatcgccgggtttcttagcccgatggacacctaaatcgattctcaaaaagcggcctgccacggccgccaggcatccttgaacgtgcgcgtctacttgcccttgacgaaccttgacgacgccctgccccatctctgtcgtgatacagtatgatcgtgattgttgcattatgattcgtgtacaaatttcggccgatctgacttgagactaccgccgccgacctcgattgccgccccattgtggtggttcgtatccgatctgttgtaacatttgttcctgactgggcagtggcccgcttcttcgtcctgcagcggcatccgggcccccttgcggtggctgcatgaatggaggaggaccattgatgttgttgttgctgttgttttgcctctgcatcagagctccaggtgggtagccttgacttggcggtggcattccataattcgggccagacatcgggttcatgccaggcagaggtggcatctgttgatgttgctgcatcgtcggcggcggcatctgcatcgacggaggtggcaacgtcggggcgggcatgttggccgtcaggccgggcaacgagaattcgctcggtcttgatcctagggggttgttcgcagcttgtttcaccatcgactggaccggtcccgatccacccaaacctggcaatggcatcgaatcgtctgtacgagccgtccggatcgatattagcagtggaagcccccttaggtctttccagaccgactcttggcacccaccttgatcttcctcttcgacccgttgagaccattttggtttccccgcggcctcgctcgccgcatcgccgacgtgccacctgtcgacctcttgtccacccgtggctctcgccctgcaccaaaacctggtggaatagtccttgctcgcggaagccaagacatacccgagcggatgatagtccaacgcccagacggtagaatcgtgtgcggcttcgagggtgacgaccggggtcgtcgggtccgcttgatcgatacaccagtgtgagatggatccgtccatcccgcccgaagagaggatgttgctatgtaccggatgccaagtgacggctgcgaatcggagcgggccaaaagtcagttcgacgagcgacgtacggtcgtcctgagagactcacaggtcacttctttcggatgtcccttgagcggttccaactctttaaacgtccgaatgtcaaacaacctgacgagcccgtccccaccggccgtagcgaccaagtgaccgttcttactccactcgagcgcgttgatcacggccttgtgtgtccgtctgccccgcccggtcgaacgagtgcacgtcagcacaactcctcccgggtagtatcaagccgagtcatgacgacctgcgactcttccttggactcacaacgtgctcagatctttacccgacctcggatcccaaaacttgaccaacatgtctttactcccactcgccacgagtcccttgcttgggtgccaatcgacacacctcacgtcccatccgtggccgctcaagactttttcctcttgcttgctcccgaaattccaaatcttgaccgacccgtcgtccccacccgtgacaaacttttcatcgttgggactgaacgagatggctctgaccgcttcccgatgggcggtgagggattcgaggttgttgatcgtcggggtataatacttgaggatcccgccttggtccccagagaggaagaagagacccgagtgactgtaagcgagggaacggatggggtggtcgtgtgcctgtttgagggattcaaagttgaaggtcgcaccgttccagatggtgaattggcccatctggttgcccgtcaaacaccaacgtccgtccggtgcccactaccaaggtcggcatagatcagagtcggcaaagtcgggtataagtcacgagggagatgaagcattgtcgtcggtcggtggaggaagccggagactcaccttggccacgctgatcggacttcgttccttgttcatggaaccgtgtacaaagacttcgcaaatggatgcgaccgggttcgacgtgaatgctccaggtggtaagagctatcgatgtgccgtacgagaaggacgtcgtcggcaggtgggcgaggagattcgaggagactggatcgagacggtagctcaccttgcacatgttggaagcaccggggtagacgatgggtggttgtggcagtccggagcgaagtttacgtagctgtgcgacgtgatgaacgggacgccgactggttcagcacctgtagtacgagaaaaggacgacaaggtgtaaccccccagaagatggacccaccgtctgccacctcgctgcccctgccgaataatccaccgtcctcctcggtttcaacctcttaggcgctctcccggcgaaatccaacgctccaccccattgttcggccgcggcgaccgagttgttgtagatctcttccttgatctgttcgtcccgcggtggtcgactgggttcgaggtatttcgtcggtcgccatggttgacgccgtttcgccgacgaggccgggggcgtgaccgatttggattcctccatctcgcgagtccagatactggtggttgatgatgagaatatagtatagtaggatgtggggttcacctgtgtgtgtgtgggtgctgcctgggtagtgtatatgttcctgcgagatcgcaagcaagacgaatgggtgggtcgagcgatggtcatgattgatatttccacccaggatgaattggaagtaacgtgattataacgtaacgtcaggccatgccgtgatcacgatttctcgttatttccaccttggaacacacatcgaggtgacgtccaacctagcctcggtcgacatgttatttatcgtcgtcgtggatgggatgatacgaggtcaatcggtagagaacccctatgccacacatacgagcacgattcacagtgcacgatctcaggaatataccatggtatcgcaaggtggtcagccattcgatgacaacgacgctcgtcgaaacgctccatccccgcacgatcatcaccaccgcccggccccggccccggcacgacaggtcttgacgttcgacccgacctaccctcaggcgcaacacgttccccggggcataggcatcagtcggttctccgaggatgacgctttcgaacagaacgaccggaaacgctcggtcgggtccgggggtggtggtggtggggggagtgacggggaggacgacgatcgggacgaaagtgacgatgggcaggacgtggctttcgagtcggtcgacctggacgggggcgaggtctctggacacttgagctcggatttcgctcagagtctacgtctttcctctccctcggccgttggactgaccccgaccggccatacgcttcaacgatcgtccttcgcctatgggtcacatccggacgacgagtatcggcatagcgaagacggcgctcgactccaacgacccgtctcggagaacggtcacgccagcaactcttccgcccgatcattcttcagtcgatcgagtacacctaaacctaccccacgggacgatcccaacggatccaaccccacctctcctgtgcctaccatcggtcgtcgaacccccgatccatcgacctcgacccgatcccctacacagacccgaccccggatccacgcacccccggctatcccccactcgctcaacccatccgtcatggccgccctcacatccaaccaataccctacacaagccgcctcgtcttcccctcaatccacgacgttgccttcgaaatccagcagctcggcgttctcgctcctcaagcgcaactcgctctccctcaccggtcggggcgcgaaagccggttcgggcaaggggaaagggaatgggagcgggacgttggatcaggtgaggagtaggacgaggatggtacacttgccgcccaaggacaaggaggaggacgaggcgcatctggagagttggaagcatatgatggaagaatctcgatctgccggtaagtggcccctcggggtcggtcgaggtcgacccctatccacacactgaatggcgcaaacgaggctaatcaaagtttttcgccgtattttttcgcatcgtccccccccgcctccgtctctctctctctctctctctgtgttcgccgtgctggatcgcgcttcactcggttcactcctctccatcaacccgcagaatcgaaacgcgcccaagatcaagctcgtcgtcgagcggaaaaggagaaacacctggcggaatgcgtacccatatgggaaggcgtcgtcctccccgccggtggacccagggaatggagacggctcgtccgggcggataccaagctgggcgacttatggttccaaggcgtgcctagtcatctgaggggtaggatatggagcgggtgtatagggaacgggttggccctgtcaaaaggtgggtctcctggacgttcaaccagagacgttgatgctgtctcgaaggtagaaagccggggccgagctgatccacggccggggcacccctcttgttcgcataccaaagaatcttaccgttcctgcgcttatcgagcgaaaaaggccatcgagtcggatcggttccccgaggacgtcttgcggcatatcgaggacgattcgatcgccacgctcccgacgaccaacttgtacgggaaacaaggaccgatgaaggacgagttgagagagttgttggcggcgtggtatgtcagtagggtggacgaagggatgggttatgtgagtccagtcgaacaagcgccggcttgcgctttcccaatcgggtcgttggatcgctgaccgtgcaccgtgatctttcgctctcgataggtccgcggagtacacctcttggcgggcatgctcttgatgaacatgaacattgccgtggcgttcatctgcctcagaaacttgctggaccgaccgtgtctccgtgcgttctattgcgggattgacgaagaggtcgaagcctactatcgagtgagtcgcagtccgacgataaagatccctcacgatcaccttgttcacctgcacgcttgccctttgcagatcttcgacaatctgcaagccgacctctttcccaagatttacgccaattgcaagacggtcgacgttcggatcccctcgacctatttcacgaccttgttcttgcatcagattccttttgaagccgccgtgcgcgtctgggatctgatcatgctcgagggagacgggcagatctttcggatcggcctggccatcctctcgatcctcgaaccgaggcgagtcgtggcaggatgaaagacgacaatccaagctcgcatgctgattgcgcttactctgaacctgcagactgtatttcccggacaagaaagaaatccaaagcgtattcgacggtcgaaacgcggccgcgctggccattgtcaatcgggaaaaggagcgggctaggctcaagggcgtcacttatgatgccgagatcgatggcgtcttggcaccgtttggcgtgaatgaggagacgatctttgaagcgctcagcaacgataattggaaagaaagcaggtttgaacgacttttgacgagagaattgccagagtagaaagggggttctggagcgggagctatgcttcccaatatcggtgttctataatgaggagattcttgacgacatgacgaacccccatacccttacgcatgtagattgatacagtgatgctagattcatcgtggatctcggatgagtgaccttacccggccagaggtagcccacacaattcgcaatcgttattgcccggcgggttctcaaacgtgcagtggggacaggccttgggcccgctcggttctgtgggccccgaagtccccgatgacccgacaatgctaccaccagcaccattgatctcgtccaaaagatgttgcgggatctcctcaaagccgtcgttacccatggattgggtgggttctgcagcgagacgagctttctataagcgggcctttcgcgtgcaatggatataccaaatcgactcactagcagcttgtagggacttggcaatctccgtcaacgcgctccacgcgtcggatctgagcaggtctgataaagctgtggcgtcgcccgtctcggaagctgtcacgactctcccgacgatcttgagtgcggactacaagatccatcatactcgtcagtgtcgtcaacgctaacaaaggcgacttccagactaacgtcatcgaataatccagactgaggtaggaaacagaaaagatgccagtcgctgaataccttgaccagagccgattgctgatcttgcgttaggtcgtcgatactgacggcttcaagatcatcgatatcgggaacaatttgcctgatctgtcgggcaggcttttcgagcgtctgatggctatcgaatcgattctcgatagggaagtcgagcgatttgaaaaggggccgaggttgtttgacgaatccatgcgtcaactgcaagaaggcagcaggaggtgtcaactttgagaaagtctccaatttcggcctcactggtgactcacatttactagcaaatactcgacggggaagcacggttttgcgttcgacttgacctgcaacccatattcattcttatggctacatatagatgtgaaaccgaaaagtcaagtcagatcgaacgtagcccgtagggcggacctcgcgcaactgggctgacctgtagaacacgtcgggcacatatcgagtgctctcctcttgcttcaccctcactgtaccgggatccacactcgcttcaatcatgtcggcttgcaccatagcgactccctgttcagccacttggaacgctagcgcttcagctcctccgctcttgtcccctgtcagcacacaggtcacgaagcgagacgaataggtccccgtcggtgatgatctggtggcggtcgggtacagaagctgcatttgagccgagaagatggtctcgagactggaaaagaagtaagattgaccatgtcgtttgtactgaatcttggtcttgtcttctggctcgctgtttcgatgcagagggttcacgtgagcatgctaacggttacgtgcgagatgatctccggcttacggggttagatcggtatagatcattcccacaatacgcaggtctggagagatgttcttggcgacctggttgaccttcgtcatttcctctctaaactcatctccgagcccgattccgtcgacctcgtgatcttgctggatctcgtggatggcttccactacagccttgatacccataggcacctcctcataaggctgataccttccgatcagcagaccgaatcgctggtagcccgactttctccatgagtccaggaacgagttgatcaaatcggccgaggcgaattcgacgtgatcgaccattcggtaaggttgggactgaagcgtgatcgcagaaggttggcatttcgagcagattcccgctggccaagaggcgtgagctcctgatgggcaaggtatggcgacgcggtagttgagtggggtgagagggggcaggttggcagtcgacgacgtgttctgcgagtttcccgcttgcagctttgtcaggtaagcgtaatatgacagatgcttgatttgattctgggtgtggtattctgcgtcatatggctacgatatacagaccggcaggcatcagcaaagtcccgtcaatctttcacggaggtgtcaactcacctcgagtggcatgcagtaatcacacatgcccttgcctccatgtttgcacatcttttcgtccctcttcctcgcgatcttgccgttctttgccctccaaaagttgtcgaccgacatttccttgatcttggacaagtcgaacaggggtttcgttagggcggcttcatcgggtccgccactgattgtggcatttcccgaccggtcgccatggacccctgtcggtgctgaatgtaggtctgtctcctctgccggtatgacgacggtcttgccgctcaacgtctgggctgtacgttgttgactaccggaagatgaagagaagacgaccggtgcttctgctgccgctgtttcggctcgataagataggaagagcatgtctccgtgactataaggttgaatgtaggttcagcggtgttctgacctggcccgttgagacctgtatgtaactcacttgaatcccatatctccgacctttctgccgttcagagcatccatcggaacttcctctccgccttgcggtcgattggcgagcttgatggaaccctgggctactggtaccggaatgagagctgaaatctgaggcagatgagcaggagtcagcgcgcagtggtgataaatgagcgacctgcaatcctaagcagctaaccttctgcgcaaactcttccccaggagtatctgtctgcacctcaatcctgaacgagccatcgggcgatcggatacggagtagctaattcccattcgtccacgattcagcttgcagcatggcaaataacgccatgtatgtcagagcttaccattatgagtttgctggaggtctaccagatcgttcgctgtatcgctatagagtgaagctagtgctcgtatgtaatttctaaagatccgtgaccttttcgtagaggagtctggccagtttgaacaggtcagtcggcacaatccaaatctagcaggagaagcttagcttgcatgatcgacctttcgcttgttcatcgtcatgatcgagtgagcgtttttgcttccgcgttctcccatctgctcgggtagccctaagaagatgacgaatacacagtcttgacggactagatcctaggtgaaggagttgtgtatctggcatagtattatagtcgttacgagaacaagagcaagattatagctagctggatcaaagagaggtgaccccgctagtatgggcgaagcatcctgccaagtaaccagtacttcctgtcgaatcaaggagtctcgtcctccagactctgagagtcgctggcatggtgtgatcgagttgactgaccatgtcaaagtctgctggtcaactatgagtggtcaagccgtgtaacggcaacatcaaggatacaggggtacaagaatagggccaagttgtatctctgtacaatcccggcgccaactactgattaaacgggcagagctagtccgctcggcgcttgctgatcgtcatcaaggaaggatagctcgtccacatctaaccgttctttcggtcccaatacacctgtcctggtttctcgcccatccaattgtaccgtttcgggttggtcactggtggaagattatcgttcatctcgagcaagacatcccgccttgccagctctatcagaatcctggcgacattggtcgcatcctagcaaaggcagcatgagagcgaagagaccgtgtaggtcagcacagtatgctgaaggctcagacatgtcgcagagacttacatctattcccgaatgctgccgaccttggaacttgcccatgtgcaacgcatctagctgtcccgccagatttcggtagtacttgggactccgcttagaccaccggtgaggtccaggtctcgtactaaaccgctgcggactacccatgacaggtgttggctcttccgggcaatttgtccggtaccacgtctcggtgaggtagttcttcatcgcctccttgatgtctatgtatgggcctgagaagtaggcgggatatggctttgcaaagacgggtggctgcaaaggtgtgatatgtagctgcttagggatctagaggaatgaagcgcgtgaatcaggattggatccctcaggaacgtcggtccgaaagctgctcacgaaatcacgaaggtcccagggctgtatggtatgaaggattttagcttcggctattcgacgtagattattggaaagcactcacaccatccgtgacccacgacgtccctggggtcaactttccgtcttgtaacaacccatgtttgcccagccattgctcgaacttttcgatcacttgcgggaacgtcggggagtcatctatggtagcctagccgaatcgtcatgacacgcacgtgagagaaaccccttcagctaagttcagccagaagatcaaccgggtcgtcaactcacctgggttatgcctgttaacgtggtgcagaaagtcgacagatcgggcctccatgtcggccgaacatacgagtggaactggtcaacgattttcaatcgcggtagttcttccaaagtcgattgcggcgacgcagaggaaggaagcgtgcctgacgtcgttggtgtcgaagacatggttggtgtagggtttgaaggctccgggccattcacgagcttgatgggcggggagatgggactcgatttagaaggatctaccaaggttggcttgtcggaaggattccgtttaggggaccctgctgcatgcccatcccattggaccagaatgacgggaaattcctaaagattttgatggcaaacaggcatagttggtatcgctggccctctggtcaataagagatggtctcagtcccgacgtacgatcacctcgttcggccagtccagcgccttgtcggctatgcaagtagcctctacctttatcaccggaaacagcgcccattgtcagcgagtccgtcaggattagaatactccgctctcaggagactcacatcgaaacaaagaaatgacttgaccggctgaggccgcctcgagggcaagataatcatggattccttctcgaccttggctgctgcgtccttcttgtaagcgaccgtgagacgcctgtagagcgcgcctcatcagcttggcaacatccaagtgatgaagccggatcctctggcccacccaccttatcaaggtctccttcttgccgtgatcgtctaggttgaaggaagccagggcctcccgcagctccaggagtgttgaccgggacgacactctctttgccattcactacgcgtttgaccgtcgaacttcgcgccacaagcaaataattgatgccagccggtatctagtactacttccaggtctgaccgtcccttgttgctgttgagagggccgacgttcaggaggccgtgacttggggatgaatgagcgacgagacgcgaggtgaccgaagttggaacggatctgcccttttcggggggagtgagggtcggtattatttacttccgcgcgaattcggcggcgcgtcactcgctcgctctctcggcattgaccgaggtttggggagccccgcactaaactgcagttatctcatcagaacatcaggacgacgaaactcgaccccccgcctaccgtctcatcaacatctatcaacagacatcaggtttaaacatcacctcacggactgaaccagctatacttacgattggtatttactactcacccgatctccagtagtgtcaagtgtcgcagactttgatttaaacatctcgtcgccatggccagccggcctccatcagccataataacaaggccacgtacggtaatgtcgtcggctcgagcaggctctatcaaaccaggcacgggaatggacgatatgggagaatggatttgcgcagtcttccagtccggaggtcagctgtattgactgcgtggatcgataacaattgaatttcctatcccacatgttttgattgaaaatacgcaggcgtgaatcaagaaataggaatcgcatcatatgaccggacatctggcactgtgagcacaaaattcgcccttgcatcactaatctattcgctgatcaattcatcatacgccacatatgcacggcttcgaaagactctggtcacacaagcaagtccatctctggatctctgacacagtcgagagcgtccatcggaatcaagcgctgatcatatgcctccgggcgttgacgtttcgcgttaccagctggtggatggacaaagttggtcctttcttctcaatgcatatccctctgtctttctatactgatggagcggtattggcaatgtctacagctttccccaggaccttgcatcatttgtttctacacccgcccataaccgttctcgtccccgacaatgctctcgcttcgtccgtccttacacgcccgggcgcccgatcctatcgatcatcccatcctaccaccagagacgaaccaagcctccttgtccagtgcatcgaggcaaaggctggaattcaatgtcaagctgtcccgagattacattggaatcgagaagaaggtaaagtggacgttccactcgttatcgagccagggcatgtttgctgactaattggatccgacaggtctcgccaaaatccaagagtacatcgtactcgattctcaacgcgcaggcgtatttatgactgttgacatgaagtgagttcacaataataagcgaggctggtcgatgtaacagtgttcagcgggacgatcagatactttgccctcggcgcgatctccgctctatatcatcacctatccacggtcgaaggcatcggttttgctccgggcagtcagaagatcatctaccaagctgctgaaggtacaggcttgcctgtcgaaagctagtcctagccagctggctgaatctcatgtttcgtcctcgctggctcaggaacgatgttcatcgaccctgatactgccaaaaatcttgaattagtgtgcaacgcgatcaacccgacatcaaaatctagtcttctcggtaagtgagggcttttgaagagctcgaaccgctcaactgcatcagatctttcggaaggtgtcatgaatcgcactcaaacgagaatgggatacaggatactcaaggcctcgatactgcaaccttctacaggtacgtccgcggttggcaccatcgatcgcgttctacacatggttcattcagagcctaccagttccgagtatcatccaaaaccgcttggatgtggtagaaggtagattcgaagagtctcagtagtggcatatattccgactaacagcatcttaatcagaattgctgctgaatgaagcgatgcacaatgggttgaagaccgccatcaagagcattagcgccgtaggttacaggtagtcaatgagatgctccctgctgacccaacgactgccaccatatagtgggatattgacaagttggttgctcaagtgagtctcccgagttgcgtatctatactgtctcaacgtcttttgtggctctagctctcgcggaagacattgcgggcggacgcgaaagcagatgagcggcgactagagcttgtcctggccactcggtccatcgttaaggcggtaggaccattgacagaagttctgagggatgccaagagcgatttattggtcagcgcgagaagagtaggttgagcccaactcaactggctagacgcgcgactgattccaggtggaatacagatgctgctggacgatggtgcaagggagatcgagagactgattgtcggtgagaggaattgcgaggagtaaacatcactgggaagtgttgtatcgacgccacctcgacagacaaaatcaacgaggacgccactgcacactccggtaaagctttcaaccagaagacgctaaagatatatgctgccaaggccaacgcggagcctatgctcgacgtggctcggggaacgtacaaggagaacatagaggatattcatagctgtgagtcggattgtcctactggtagtgagtagcaacgaaagctgatcagtaccgcagtcaaggatcaactaaaaggtgcgtaagcatcagtggactttggtcgctgcgattctatcagcatcgtctttgaccctcttagaggaattcgatttgccgttcgaccttcaatactctggagatcatgggtttcgactgacgttgaaggatgatgagttactcgggcgaccgctgccaccgaaattccgtcaggttggcaagcgaaacggaaagtacgtaattcgctgtgtttccgttcgatgagagtctactaaaactatttgcagactgactgttgtccatgagcatctggttggtcttcatgactgtagacatccagacccgagagaaattgcgacctttgtataattcaacagacgaagctgaataacagaatgagagactctgaacgagaagcttttcttatgagcgaagagatggtgaaccaactgatcgaagatatcgtagaacacatcggtgagttcctcccagtgagaatgtctccttgaaagtccgcatctctcaaagcgtccttgccaagcaggctgtttgtactccatctcggaagccgtgagtgacgatacagaccattaagtgcaaagctgattcatggccttgcctctaggtaggaaaattggacatgctcctgagttttgccgatgtctccctataccaaaaatacggttagtagacatgttagagctggttagctgcccgtaccaattgggaaactgctatcacctttcagtgcgaccaagattctccagttcccttgcggtcagtagtcgtaagtgctttcgagacttccatacctagctcactacagacagtcctctatcagatcaagaatggaaaacatcccattcttgacaacatggcgagttttgactgcgtaccgaacgatgtatacctgtatgtctcagacagacaggtacagaagcagagccagaacccgaatgagcgtctttatgaaacagtgctccgggttcacatgcctttctcctgatacaaggcgcgaagtaagtggaatcgagggagccgaaaggagatagaggctgattgggtgaaattcgtagcatggctggaaaatctacttaccttcgccaagtcgctttgctggtgatcatggcgatgtgtggatgctagtaagttcgctagacagtggcggcagcataaggtacaatggtatcgacgcctgtccctgttgccgcgatgtcgaacgataatagcgtgcctgcagattacgccagtgtgaaaatccaagatgctgttttgacccgactttccaacgatgactctatcgaaagatcgctctccacgtttgctcaggagatggcgacctcggccatgattctcggtaattatgagctcgttctcgtcgtaatacaacacctgatcgcgagcgatcgttgtcaggtatggccactagagactctctggttctttttgacgaggtcagtaagatctggcagggctggtcatacatgacttaacattcagtttgcagctcggtagaggcactgcgccagtcgagggggcagctatttgccaagctatcgcggaggagttacttaggcgcaaagtattaaagactggccataatcgagattggaacgctttagctgatgtttccacggtatccatgctaccatatagtccttcgtccttttcgccacccatttcagggagttgagggaaacactcgggccatttcccggggtagatatgtaagcgctgaagagactggactatctgctgaagctaaattatcttactccaacccaagacttcaccttcatagcgaagtaagttacggcgatacatacccggctaccttcaggtattctaagagcgatttgctgctaacccaggtgaaccgaagatcgaatcaagggcagtttggtacgacctattcctaccgcgttatcaagggtcaggacacaaacgacggacattatggtgagcgatttatcagtctcatctactgtctcattgttgagactctcggatatcgcaaactagggctagaattggcgaggcttgcggcgctgcccgaggacatgttggaagtggcggagcaagtcgcttgtaggctggaagtaatgcaagagaaaggtgcttccgaagttttgatattgctcgacctcgttccggcggagaacttatatgatttccggcgcacaggtcacgccagctctgaaagccgattcgctacctttcggcgaaagctcttgatggatgtaagcaaaatccagcggatttgatcggttccagcttgatcgaccgcgactgacttcgacccgcgtcgctttcaagctacataccaaactcaagactattgtcgaggtttccactctacccgataaagagctccggatgtacctgaatagtctacgactcgagaccttggccgcgctgaggaaagcctatctggagcatcatcgtggagagaaacccttgcaagcgagctcccggtccccggaagagcaaaccacgcagctgtcggaacacggacaagagttgggggcttagcatatgtaccttggattagacggtgtaaggtttcaggtgacctcgtagtctaggccagtctcgagccttgatcatgatcacgccgaatgtcaggatcgattagttgcgacgcgctttacgagaattcgatcgcgtaattccgttacgagatttgctaatggtaagagtgagttagcgtagtttgatcaaacatcaacacagctcgaagctgtgcgatttcgagtgatcccccctcctccggcctcccctcacccacccccatcacggtcatacatcacacatacgttcgccaacgaatactagatacaagagttgactgaactcggtcaatagagacatctcggaagacacacagaccaggaccattgctcgagcgtacgactatggctcatcagtacccggacccctacggtcatacgcgacccgaagtacaacatggctattcagattccagcgcctccggattggaccagtacagcactcccaacgatcaagccaggccctactctcaagccaactatcctatcccgcaagagaggatgtcttcgtatgatagcatgccagagaaatcttttgctcgggaacccaagatcgaagcggatggcacggtcaggaggagcaggttcgtaggtatggctgcgaacggagaacgtcctgccagtcaatggactcagggtaagtcgcgaattattctttggcttcgcgttccactaccggtcgctgatcacaacgatgctcattgctacatgacgaccaggtgttgacgtcccgcccaaagccaccggttggttgcgagaatggcgaaaggagaaccgggctagttggggcaaggtgagcggagagtttaccagaggcatcaccttccctttctgaatcccttactttatcgtccgttgcctttcaggggggcggctggaggacattcggacgattcttctcatgctgcatcctgagcaccctttttgtccttatctcggtcgtcctcacgatcgctatggcaagtcgttccgtcgtcaatctggtagagtcgggggcacaaaagctgaccgtcatcttgttcactcttctcagtgggtcaggccacctgatatcaggctgttcgatatcgatctcccttcgtcaaacgccgtggccattacgacttcctcgttgtcattgaactttagtctgatcatcgggtacgtcttcacactgccatcatcgaaattcgaatactccgtcagctgatcatgacgtctgttctttgatggacagggttacgaaccccaactggttctcggccgatttcaaggagatctctgctgtgtatgtcataccgtgccggctgcttcagtcatgttcaaccgctgatcggtctcgtcgtcatcgcagtgcaaagtggcccggtcttgatgcagagtcagtacagaaggagatgtgtgatgacaaatatgtggagaaacgatgctgatggactgcctcttgccacggaaacgctagctttggaggcggatccctgcgcgacatcaagtaaggcagccggtgcagactcctgtggtcgtccttatgagagctcgcctgatcgtcccgatgtgcttcgcttcacaaactagattcgggggaaacagcgccaccaacttttcgttccccttccaggtcaactactcgaccgatctcgaccccaactcggtcgtgctatccagcttgctcggtcagtcggaatatcttcccgtcgtcctgatgtatgttccaaactgaatatctcgatggacaccctcagagaaatgcgggactaccccacctggagatatcactatcgactacgacctgaccctcaagcttcacctcgtcgctttcgacgtatcgcctaccatctcctcttccgcctcgctgcagtgtcccgtctcggcagctgatatcagggtgagtggttcgcttaatttgaccgcgagactttactgactgtcaagccgatgtcacatagaaaatcgcgggtgccacgaagcgagacaacttgccattgcttgatgcagaataaagctgctctcttggccgtcacatcccctctgtacaacacgatacccctcgaatcgttgccccatgttccatgaccctatacgaaagctcacgaatctcatcgatcggttgacgcgcgactcaaggtgttctcggatggtctgccagtctagacgatacaaatcgggtttactatatagggggcgctgatgcttgcagggcatcattgccatcatgcatgcaatcgcggtttgtgtttacttcagtcctccatgccttcccatactctatcatcctctccttttttcacatgatgacacagtccttgtccttgccgcctttgctgtcgccgccaccttctgtcgctcgggctaacagttcattacggctcgcaccgggcgccgcattgatggcagccgaaccaaagtttttcaatcgcttgtctgcccgcttgtcaccgttgtcggcagccatacggtaccactgtatggcgttttgaggcgatgcaggtgtaccgataccgacctgcacatgattatctcaacgcatcagtatccagtcttcaaaaagctgccgatgagatccgcggtactgacttcggtaaagtaccctactgcgtattgggcctttgccagccccatctcggccgcctttttcgcccacaaaaaggcctcggtgtcggactggggtagtacaccgggggacccgacgaggtaccaagccgtcaacgcgaagcaaccatctcgatggtcttgctgagcggcgatgttctgtaaatgtcgatcgcggtggagtcagagtcacctcgtcatggtcaatgggtcacagtagctcacgtaatagtgaatgctcagcgcggcatccataggacagcccatctttccatactcgtagcattcccccagcttgacggcgctgggagcgtatcccaactcggaagcctgcgccaacaactcggtcgcgtactcgaggtcgacgaagaggacgttttcgatccctcgttcgtgcaagagggcgagttcatgcaaagcatgagggaattcggcggaagcgtgttctgccgatcgtttgagccacttgactccttcttttgggcgttgggcaagcccgagagatccgttcagctcggccgttcctagtcggtacatggctcccggatggagggccatggctgctttcctacgtgcccgaaaattagcatgtcagtatgaccgtcattctctcacatgaccacacatagaaagtatgccggtcgcagcgacctacttatagaactgaacagccttagcgctctcccgtcgacacccccaaccgtgctcgcagcacgttcctgcacgataagcggcgtccgggtgtccatgcttggcggccaaaacaaagagcgggaaagctttatcgaaatcctgcctacttcgcacggtaccgatcccgttggcgtaacaatcggccaaatagtattgcgcgtccggatgacctctatcagcgagtcgtttcaagagcgccgtggcctccttgacgagatcttcacgtttctgttcgttgatggcagagagaggagccgtggtggaggacaagctagggtgggtctggccatccggggcggtgttggcatcgagggatttggcggcttcgatcatgaagacggcaaactcgaagatgagttccgggtcgttggtctttttcgcattctctcggtagagctgtagcgtcttctcgttggaaagtagagcggcttgttcaccaggccgaagatgagctgataacatggtcttcaaaactcagcgttcgtccatgatcacagccttgctgacaaatcggcttacagttgtcaagaagaggtgtaggctggatgggtacaggaggcatccggccttgtcgttgagactgattgttcatctgagcgtacggatccatctggtcgacgggcgacatgccctggtcgtatccaggaccgacgctagattgatagacggacatgggtcgtaagagtaccgtgccgtgcttgtcccacgatgatggtgcttgtcgtgcccaaaaacgattagaaagaaagccggatcaaagatcgaaagggaggtggtcgtgtgttgcgtgcctcgtcttcagtacatgggtggtcggaaaaaaaagatggtcgtggaaatcgggtatgaagtgttcgtgaaagggccaagcttgagccgggacaggcgtagcgtcggtcgtgaagtaggggctgaagcaatcagcaacgtgaccgactgtcgtattcaaaagtgctcgtgatccagatgatccagatttagagggtgctcatgtccagacaacacgaatgagcttcaggtcgagacggaatcggacttgatgctattcaggatgagctgctgtcgatcaacaacatggctcgctccggcggggacagaggagggaaagggcgggggaaaccaaggaaacggactttaatgattcaaaaatgtccgcgcccgccagcatcatcatatgatcattcgcttaacaacaacgcatctatactccttgaaccgagttgaaatcatcaaagcctacgccttggccttgcctttccctttgcccttgctgcttttgctatggccattcgtatctccattcacctgcctttccgagttgagcgtttcggacgcaaacttttgtcggaccgtctcgtaatgtcggatatcctctagcgagaccgagggtaccaattcctcgagagccgagacgaaatccttttccgtaacaatgacatcagtctcttcgggtttcgccattgctgacagatagtactgcggcgtgagtggtttggggtatgcccgaggctctgggaccacctcgagcgcagctggatcaccaagtccacgtcggtcagcatgggttctccctcctcacgctgattttgcaaagagtcgaggctcaccgatccgctcatccacagccgaagctgtccgtgacatggctttgagcatggcatcagaacacaaggcgtaaaagtcggctccggtatagttgaacgggcatcgttccgccacggccatcaggtccataagagggtcgaggttgaacttcctcgtcaaggcggacaagatgttgtattgcgtcttgtgatccgtactaacgctgagatagagcatacgatcaaacctgtagtggcaaagctcaggctcagcaaacgcgcttcccgctggatctgttccgagatgaatgtcacgcggctcaccttcccggtcgaagcagggcggggtctagcaaatcgggcctgttggtagccgccatgacaaagactcctgccccgcccttgccctctgccattccatccagctcggccaaaagctgactgacgatcctgtccatcacaccaccgctatccccctggttgcccctcttgggcgcgatcgagtccagctcgtccataaagatgacgcacggctgagcgtcccgcgccttctgaaagactctccgcacgttggcctccgattcaccgatgtacatgttcaaaagttccggccccttgactgagaagaaattgagcgagcaagacgtagccacggcctttgcgagcagggtctttccggtccctggtgggccgtagagcaagatacctgatcgtttcttgagtccctcggcgaacaattccggccgttccaatggaagttggatggtgtccaatatgtccgacttgacatcggccagacctccgacatcatcccacgagacgttggggatctttggggcaccgatagcatcggctagcgagcttcgtgccttgttcagcgcgttctcaaaatcggcattcacaactggcatgccaatatgcattgcgcttgcagcgtgttgtctgtaggacgcaaacagatgagccgtgttctagagagtcgtggcaaggcattgcgagacttgctttagatccgataatcgcttcaccgatgccatttgagcgcggtccaccaagtttgccagatcgatagccgtcagtgcagcggtctctcgagctatccgtttgagatccacgtcgatcgcaaggtccatctcctgcacacgctctttcaggatgaagaagcgctcgggttcacttggtgcctaaggtccacgtcagctttgccttttataaccgagtcctggccaacttacctccaacttgagctcttgcttgaaaactgccatatgatcctcggatatctgatccggctcggtcgccgtaccgatcaggattgtgggcagaccaggagcgctcgttttccgttgcatcgcagtgaccagttttaccaaaatcggcgagtctttgagacgggcgaatcagagactgggcatcatcgatggagtagaagcacaaaagcagctcacctttaccgcgccgtggtccggtggatttgcggccaagagcttccacgtgtcgcagcaagagcacgcatggcgcacaattttgcgccttttccgcttgcgccaacaaggtaccctctgttgtcgccggcgcctcgtccagaatatcgaaacaattgacctgcatgtccgggcgggaggctcagcgaccgacggaatgggaatggaatcgcgcgataaacccacctcgacgacgtgaatcccgaggtcctctgccactctacggatcaagctcgactttcctgatcctcgagcaccagtgagtagcagggggatattgaacgacccgagcgaggatgtggacaggtgcgcggtcacaaagtttgacaatcgccctccgagggcctgcgaaaagacgcccggttcacgcgctgaagtacggagccgtcagcctgcaatgcgatgtgagcgacgcctcactcgtagacctacgtattgagagccaactgtgtattcctggcaccgacttgccatgctgaacgctgatcgtcatcattctcgtcttttccacgtcaacccagcagccgaattcgcctgctcgcgcctgcgaagacgcagacatcacaaagtcttcttcgagagggagtaacgggtcgtatgacatgtacgatacggcaaagtagacgacggcgatggtcctagcgttcggcaagttgcgacttaggggtcagcttgggaggatacgccccgctgatcgtctgctgctcacttgggcatatgtcctacgtcggaatcctcgacctcttctaggattgggatggcgactacatccccttgcttgatcagtcggcttcctacgcctcgttcctgctcgaaatgggtcctcaacccgcgcgtgaaccgatcctcgtatcgcttgtcgacggaccacggggtggctattcgggaaagggtaatgtacttggcgaccgggagagacggtgtccgatggccagaggggattgggaggagcatgatagtcggccgcgtcgacccggacaggctcgttggatgaccgcataggcgatgccgcagcataggcgataggaagatggggtattccggtctgttcaggtgcatcccttgtgagccagtatgcgggattgcgaatctcgcgccgaccgacttacaggtcgtccgctgtatcgtgttgcaccggcatgacatccacctggactagtctcgcttgcgcctcgtgcgatccttgcgagatctttagaacgacctaataggctcgatgagacctgatgagcatccagtaatgatctctcgacgtctgtgatccgctatacctcgactcacccaatctccgacaaagacccccgcccgtgctaacccatccatcgtcagccaacacctcgaatcctcgtccggccatccttcctttgacgtccctgccacctcgtccgcctcgcgctcttcctcaatccgtctacgcttatctttgggcattcgggcgagacagaccccctcgaaagcgactcccctgaattcgcccttgggggtacccggacgtttcccaccgactcctacgagcgcgtcgagctccccatctacctggtcgatcccgtcatcgtcgacatcatctcgatgtcggacggaagaatgggtggaagaaaagctctcctgtcgaacgagaacgggggaaccgaacggcctcggtgtgagcgagcccgagctgacggacaacgccgaggtcggggtggatgacgaggtgggcgagtgccggcgaggcttgtcccgagaacgactggcagggtagtctccgtgttcgtccccctcgtaatccagatcctcgtcgagctgtcccggtccttcgtcgctatcgggatccgcatcgtcatcctcatcatcgtcgtcgtcgtcatcgtccagtttctcccgcaagagggaggatgaagctagaaacgcatccgggtcgaacttttcgctgacggcccatcgtctcttgctggaccccgactccgagttcgagtacgaattcgaacgaacgtcggagaacgagctcatgatcccatgtacagcgatcttcccgtcaagatgaccacgagcgaaatcggcatccatctcgagttcgtccccgactgaccctgacctcggatcctcacgctgatcggaattcgaggagagtgaggagacgagcacgatctccgtccgtccacgctggatgatcccttgaggtacagggctggtgaggagaacgacgaattctcgtccggtggtcttgtccgtatagatctctgtctgcctgaacacctggagaggtgctgtggtggacgacgatgccggtaatgtcgatgatgacggttcggaggacatcgacgtcgacgtcgaatgggtatccagcgaattcgcttgaatcctctcgataaccccgggtaaatcgtcttcctcttccgacccccctatcggctccccactttcgatccctttcgacttgccccgtccttgacgtccgatgggacggagtacgatcctgtccagcggtacaggctggatcaaggtgatcgatatggggatcccgccttgatgagcattccaactaggattgcctgaacgagcggacggtcgggtgagggagggaggagttggccagtgagggggaagggtggggagtcggaggttggtattcgggagagcttcccagggctgggacacaggtccagggaacgtcagcggtaagatcggaagtagggcttagctacgagaagcattgaaggaatgaggacgtaccaagtcgacctgggcaaatacgacctctttttctcctcttcccggtcgagaccgtgttcgagttcgagctcctccccaagctgcttcgccgttcgatccagacccagatcccgacccggtggctcgttcccataacccatcctcctcgggcttttcctgcaattcatagcagatggttacataccccgtctcggtggatgagagcgggtggacgggctggtcgtcttcttcctgggcggtgaggacgagttgatcgtaaagagctcgactgatgtgtgggtgaggaagacgtgaatcgaattgacaggaagacgaggtggtcgtgaggcgtggcgtcatgttggcgtagctgtcgaggtcagcaacagagctatagaggtgcctaggtttgcatggatatcgtgattcgtgttgcttgtcgaggtggatgatctatcaacctctctctacctagctacctggtctgctccaactaccaactagctaattgccggttacgcgcgcgttgccgggattaacaggtacgtcagtgggcaaatacgtaagttatacgtaagattattacgtaatcaggtagaccccggcctctcgcgtctaaaaggtgactactcaacttgttgtcgacaaaccggaccataagcctgtacttatcatacttaccttggcagctctgtatcattcgagccttcacctagctcgcaggggtctcggggtccttcccattgcacagcgacccattggtcttcaggaaggaaactgggattgtgtggcttcggccattcactggtcaaatgatggataggcttgtggatcccttcggggttcccgggctattacttttttgaaccctttttccgactttctttttaatgctatcgatatattcgtgactgctgttctcttcttgcctcaatcatcccccccttcagtcctgccaatgctctgtagattgacaagactaccatcctatcgtctagcccatcctcgatcactcgcaatagctcacatctccaccgccaaccacctcactccgacgaccatgccagaagtgacgaatcgactaccctcacgatcgccttctccaccagctaaacggcttcgcaccgaggaggccgtcaatcaatcctcaactgctaatctcagaaacagctcgcactctgccgaccatgtcgttgtctcccagacgtcgtcgtcagccgggccgtcgctctcggagctgatcgaaaaggagatgaacctgcccatcgaatacccgcaaacctcttccgccgggtctcgatcgggacaaggaggaaagagggagattgtatacgaggacaagctggtcctcgccccgatggtccgaacgggaagctgtgagtgtctaggtctcgtctagaccctgttcggatcaaagaggaaagtgggtatccgctaaatcgaccgaatctccgtcctgcttgtttgcttcttgctgccatgtttcttttgcccctcgtcggacctgcctggatgatatttgccggtcatagtacctaccgtgagcccacctttcttattgtgattcagccgaatccgtcatactaattacagacacgctacgccatccgcttccttccttccccctgatagaggttgttatcgctgcactaccaagccgggctcgtctggggtcccgaggtcgtggacaaggctatcatcggcgccgagaggctcgtcgaccgtgagtaccgctcggagagggtgtcgagagatgtcctacgagcagtactaacccgagcgtcatctgaacttcgtttcgcattatcgggatggctcttggtcgtggtgtttcgtggtatggcacactccgacgttgatatgagcagcgcgaaccggggtgatcacttattcgaaaaagggcggggatgggaaaccgatcttccagtgtcatcccgtggagaaaccgttccgtgagtccatggtgtctttcgtcagatctcaggacgttcagaggcaaacggccaagctcatatacggcgtggtgtaccatagtcatcttccagatcgggtcgtccgacccagaattggcggtacaggctgccaaggtcgtacaacaggatgtggccgggttgtgagtaggcagataggacaacgcccagatcttgggtatgctaaagcgctgcggtgggacgtcgtcagtgacctgaactgtggctgtccgaaaccattctcgtgagtgcaatcgggaatatccgagcacaataataaaatgggctgaaattcgtttccgacaacgtcacagggtgcactcgggcatgggcgcagcactcctctcgactccggatctcttgctcgacattctccgagcgctcttgcgggaaattcctttgcctatctcttgcaaaatcaggctactccccgaacaaccatcgacgctccacctagccgcacgaatattgcgaaccggagttggttgtttgaccgtgcattgcaggacgagggatatgaggagctcggtcaaggcactctgggatcggttaggcgatatcgttcagctcggtcggcgtcgaggcgttcccgttatctgtaacggggacggtgaaggttgggcaaattgggaggcgattcgggagaggaccggcgtatcgtccgtcatgatcgcacgagcggcggaatccaacccgtccatttttcgacctgaaggacccgtgtcgaccgtggaagaactcgtgcccaacgtctttctacccgcggtcgtttatctccagaatcacttttcgaacacaaagttcctgctcgctcagttcaaaccttcgccagcacccatctcgcagatgaaaaagcacgaaaagcaggcatacacacaggccatcgttgcagccaagacgatcgaagaggtcctcgctgtctgcaagctcgatgtcgaagagaccagacgcaagggagaggcgtttatcaaggaactgcggcgcgagttgatcaggcgggatccgacggcttatggggacgaagtgagcggcgaggatgtcttggtcgagaaccagccgacgatctgggataagcgtaaagacgccgaggatcggggtgccactgtagatgagctgccgagcgagggagtcttgcagcaggaagaagacgacgaggaggctgccttgaacgcgtgagacctggtagacgagatcatgttgatcgtacactgtatcataaatcatcagagcatgtttcacagcatacgaattgctcgtaatcggcgactcgtaaatagcccccacctgcgcttatgttggccctgaacttgaattggcagccattgacatcgaccgccaacccgctattgtgggcttgtggaggagccgagttcgagaacattattgttcaccgatattgagagacttcagcaggtactcgtgccagcatgctgggatgaaccattcaagttgaataaaacgattttcgggtactgtagctgggctgcttgcgataaattttcaatatacctgtgcctaaaagtttcattacagtccttcattgaggtttgaccaggagtactgtgtgcgagacggcgcatctagggtgctcaaggggaaatctaagagatggttagaggtcttcaaatctgaggaatctcggcgggaaggtgggcttgcttgcggggatactcaggatgagttgacgcgtgcgcgccagtcaattcggacccaagccagggcgtcgatatcctaccgcagcatactggactcatcgcgatcaaacaaataaaacatgtctgcttgccagactaatgttcgaagtcgattcaacgtcgaggagcgcagggattttagatcaacctgatgaatgcaaccagtcctcaaggagcctggtcaatggtacaggaaccaaaagtcacaatctggggttgaaacgcttcgttttgccgacctctccaggatgaagcagagcttcaaggcaggcagagaatcaagcaatttggattacacctcgagctcgccatcagaagaacgatgcaagctacgccagctttggcttcacccttgacctataggggtgaagaggttgattcacgactattcttgtctcaacaccaccggacgccacttgtctgaaatcgcgcgtttgaagtttgtcggataactctggcgccagcgcgcttctatagcgagatccataacttacgagaaacgaggttacacgatactatctgccttcagggacgacttgtgcttacgcgttttgtttagtcgaagccttgtttcgttgtgacgggtgagtattcgtgtccatgcaggcgtatttcgtgagcatgagacaagccatcctttgttcttagcatgagaacgatggatgctttatcgctactccttcgtctctcaacaaagaagcgactccaagcttgactgcttgctcctaatattcttgcgttcacgcgtgtcaacaacctgaggcgatggctatcacagctcttacgttctccttcgtctttccttgataggcgaatcaatccaggcaattcattcgacgaaatcgtacatatcgtgtgacagagcgtatgattaacagtcagatcaaacaaatatactcgagctcttacgtcccgttcgcgtctacccttatcggtcattcacgaccgcagactgataggtccaacggcgtaaacgcttactatgaacctgcgccgtcgcagcggaaaaatcctggcataggagcgacttttccgcaccacctgtctgaaaattacgtgatcggtgtttcgaggatgacctacagtaggcggccgtcgacgagcttctacagtgccgccccgtgattctgatcgattttgttggccgggcggatagcacggcttgggcctgactggtttcgagtagaggcactgcacgtactgcccaatgaagggaggacgaaggaggtggtcaagtctcaaactgaaccgtccgatcgccatcgttgttgccggccattgttgtaacggtcagtcagtattctcgctgatgccgacatgaaagacatgaatctagcatgatatcctcatctaccccacatccgcgttcatccctggcaaactaaggctgagcgtgtcccgggtaacgggggtacaacgagacttctcgaacagtgtacctgttcaacaaccaggcgaggattcgctcggttccgagtccgtatctagcgggggcaggtggagatcgtcagtcgtgcgtcccgtactatggctgtggacgcccgtcaaactcaccctccgtgttccatggtaccgtacgttcgctgatcgttgtacctgtgagacccgtcgatgccccggatcagtacacactacgaccacctcgtcgctggcgtcaggcgggagacaacttaccagtagtaagggctgggatcgatcttgtgctccttgtaaccctccaacaactgcttcaagtcggtcatcctcatgctacctccgacaatctcaccgacaccgggcatcaacaagtcgcagctctcggtgtagtgctcatcctcggggaccctcttcatgtagaacgccttcatctctctggggaacccggtgatgaacatgggcacgttcaagatgtccgtcatcttcctctcggccgcctcggcgatatcgtccccgatctgatgaggtcggggagcttgagccggatcatcgtcctggaagaggatctcgtgttcgttgagccattcgatggcctttttgtagtccattcggaggaaaggtcgagcgggagcgacaaagttggggttgagctctcgtacgagtttccccgcgaccgggtcagcgaggacgtagtcgaccgagtcgcagatcatgctctcgatgtgagtcaacaggtcgtcaaaggtgatgaatccgagctcggcctcgacgtgagtgtactctgccaagtgtctgcgagcggaaagacaacgtcagctgccgtgtggatgcccaacacaccgtttgcacgcaggaagtcggtccgactggcacgcgttacgtaccgtcgggtatgactgttctcggccctgaaactctcttgtacgcaaaagacgtctcccaaactgggcaaacacgtctccaagaacaactgactgctctgcgtcaaataggcttcggagccgtaatagtcaaatttgaacagcgtcgacccaccctcgaccgaggtctggacgatgcagggcggggtgacctcgaggacggtctctttagcgtagaacctcctaaaagcggtcaagagtgccgcgcggaccctcatgatcgccgccggggtctcggcacgcaggtcgagatgacggagacgttgacggaccgagggatcggcgtgttcgttgaagagcgaggcgtaggattcgggaccggtgggggctcgaccgatcatcttccaccaatcggcggcgagctcgtgtccgcccggagcggtcttgccctcgggtaccgccttgagctcaccagtgacctcaatggtacactcggtgacgaggtcgagggcgtcgagcgtcttgtgcaggtcacccgagaggacgagctggaggtagccggttccgtcacgcagggtgataaaggtcatctgagcttgttgacggagacggtgaacccaaccgaacacgcggacacgcttgtcacggtattcagcgaggtgtccgatcttgacctgcgagtcggcgagtttcaagtcagaaggctgggcctcgacggcgactacgaccatgacgtctatgccgaacgagaactcaccttgggagcggcaggcaagctagtatcctcgaccaagatgatcttggcggcctcttcccgcctctttgcatccctttcttccttctccctttcggccttttccatggcctccttgttctcctcggcctttttcacctttttccagtgggcgtcgacaaacttcttgttcttcttcaacgcggcaccgctgatgggttgccaatcgttgacctcgggcgagtcgggcttgcgtaagaggataggtcggtcaatggcagcggtcggggaagggaaagaggtgagcatggcgtggaggatagtcaggtaaggcgaggtgctgtttccctgagcttcgggaccatccgagccggccttttcgtcaatgtagatgggttctaatcgcaaggtcgggcgaggtagagcggattggaatcaaaacccctggttgacacgccgtaaaggaggaatatgaggactcacccccctgagcctcggtctcgacaccaccatgggtcttttcttgaccggtctgttgacctgtgactcccaaggtctcggcgaccctggttgacaggtcagatacggcttgttgaatggattccgccatgtttgtcctcctgatctgttcgctatgctatgtgagagtgagaggataaagggatttagccaagtggcacgatatcgacgatgagatatagatatgatgatgatgaatggatatgattgactcgactggacctcgcaggggaaatgggaacaagtcatcacgtgataacaagaggtagacacagaagtacatggtaacctatgactaactacttgtaacaatcatcttgcctgtccatttctttgagcagtagtaccttgtgcatctgcagcgaaagatcaggtacgagtgtgccggatcatgtcgaaacaggcgaaaccaccgccgtccagcacccgtcgcgatcaacaggtcaacttgccaacctcggagacaccgcgagacgtttcctgggattacgaacatgttcaggtcgatggtttgcagacggaggaagacaagacaaggccattattggatgtaagaacaaggtgagaatcttgagtttgataattggtacacacgttatgaacattctgctaacatcgcttcccttcctgtcgacgatggcagcttggtagcggcccaagctctccgtcagacccgtcaacaccatctcaacaacctcttccccatcttcacctcgcctggtctcaaaccaaagccgaaaccgaaacccaaagcgaaatccaagcccaatgtacacgatgctataaatgcagtaccggaacccgaggtccttccagccaaggaaacagcgatggagcaagatccgctcccacctcatcgacttcgattgttaggcacctgtcggttgacgctaggaccgatcaccatcgatcaggtcaatctatgggaatgtcgttgggagaaccctcaagcagttctgccggctcggccgctgccgcacgctcaagctaaaggtcggccccaggttcaggttcaggccaagggatctgtcgcatccccgatgctatcgcaaccgcaacctcgacctcgtccgcaaattccatttcgacccgcacctacacctgctagttcttcttcatcgacaccggcaagtcgccttgatccctctcggacccagttctctcttgcttaacaagctgatgacgatctttatcgagtcttccaggtcaaggccatgacccccgcaggtccatccaggtccaactcggggactcccgggattcaacaaccatccgggtctacaccgagacctgcgggacctttacctatagtaaatcactgctttgctctcctcttagaaccggctcgaacctacaactgacgctctaacccctcatctcccacattcgcagtcgcgcgaactagtcggcctcgtcaacctcgcagccgagactcacccctggctccgtaccctcattcacagcgcagcagtccacacggccactctaccggatttgaaaaagttgggaggagtcgtcgaaatccttaacaacgggttcgagctcccgcatgatatccaggctgcacaaaaggccgcagagaacgtcttggcttatgtcaggggcggggcgaagaagagagtcccgttggtcccagcgagtggtactggaggggacgtcaaggacaaattggtgggaaaggtggtcacccctgccgtcaagacgtcggtgccggttcaggcgacaatgccgacgtcgacgccgacaccggtgccgatctcggccccggtcctgaggcccccagtgattccgaccccccttcctgctcccatgagggtcatgattccgactccagccacgattatgccgccggccgctgtttcagcatcagcagcgtcgaggcccagcccagtcaaaaccccagcgccagcatcggccgctaccacaaaaaccaccgggtcaaagatcaaggtcacccctggaggaccttccgctcctatccccgaatatcccctgatcctcgtctcgttcgccgagaacccgtcggtcaagtttgtccttcccttcccgttcagctacacttcctttcgacctaccgtttcaccgccctcgattgcgccggcgcttcctctcccacctgggtacgtgcgcgcgaaaccggcacgacggggcgatatgctattctccacgttcctcccttcgaaaggctggggcagatggacgcccgagaacgaagcttcgtcggaatccgctcggaagcgacgtcgtaaagatttctcctcgcacgcccggttgggcctgcccaaggaggatcgggatttctccttgggcgggtgtacgatcccgcctggtgcggtcgagcccgtgacgatcaggtttgaggatatgggggaatatacgtggctcgctttgaaagcggtggagaaggagaccgagacgtgtttggagcagaggaggcggcggctggaacaggaaaaggaaaaggaggtcgagcgggccaagaagacggcagagaagaagaacgaggcagagctggtcgtgcccaccgtcggaactgagaacgggaccgacaattccgagaggaaaatggaagcggaagatgaggatgagatcgtgtgccagaaaccaggcacggcaagcgtcaagaaggtcgcgcctgctgtggaacccgagaagactacgaccatcgtcgagacggcgcctgcagacgtccctaagccttccgaaccgtcccccaagcgtcccaagcgggatagcaagaagaagcgatggagcgatggggaagaggacatcgttccgacctcaatcaacgctcgaacggcaaaagcggcaacgaaccatgtcgagccggaggacgaagctgttgtcgtaggtgacgatccgagcaagactttcaaagcaagggtgttcaaccagttggtaagtcgattgacatgttagaccgcactggcaggcgttctgactcgatatctgcagctcaaaagggttacgatgagaaggtacctcaagttgcgtctaccggaaccgttgccagacgaccttgtcaaggtgagacatgtcacgttacgaattgttctcatccgaaccgagctgaattcttgcggcgcgacaggcgagcactcacatgtctgatccggtaatcaagaacctgacggttggcaaagctggacaaggccattccattgtggtcgcgccggtcgaaagcaagaaacgacctcgaacgttattgaccaaacggaattctgtcgctcctagcgcgaagagaatcaggtcaacggcaacgaccacgacaccggacttggccgctcatgatcacgatcaactcacaccgagtcacatacctcctccttctccttctgatttaaacgaccctgaacctgtaactcaagctgtagctcctacggaaacgacctgatacgaccgttgatattttgatcatgacatcccttaaatatcgaaagagcacgcatgcttaccaacacccatcagctgcacgagacggtctgcggcaagtcgacgtctatgtgccagagaatatcgccatcggcgccaaaggtatcgagctgctggtaagtgaagaacaccgcgatgaaacttgcttggaaaatccgctcagagctacgattgtaggtcttcattcatggtggagcatggcgaacgtgaggcctaacgtgcgactgacgtcgaatgctgacgaatcaagctgatcatatagctcttctttcgtctgatagaggggacaagtcggaacatggcgatcttcctcttcgcctgagttcacaagtccctgagagccaatctaaaaacttagtcatagcggtccccaactatcgcctttcccatcaccctgatcatccagataggatcacaaccgttcacccgattcatgagctggacgtggcccggagtctgctttggctttgcgatcccaagaacatctcgtcatacctcggagctggtcctgaatcatctggagagaccgagatcgagtcgatctacatggccgggcattcctgtggagctagcatactgtccaacatcctgttcctcctccccaatatccctgtcgtccctcaaatgatgatcatgatctggccacctccaccaccaggcccaccttcacagacatcatggacaccagaagagaaggaacgactgctctccatcgttcgcaaggtcagggggatggcgtttctggacggcatctacgatctcaacgacctgatcgtagaataccctagttacgagtttttcgtggaaaaggcgtttggaaccgattccagcgtaggagggagctgggatcaggcttccgtatcgaaacagtcggtcgggagtcttcctatagaggtgtgggacttgttgaaagccgagaatggacccaggttggtcgtagcgcatgcgctcgaggacgaactgttgagcgagcggcagagtgtggattggtacaattggctcaagggcgtgctcggtgataccgatcggctagtgtatgataatgcctcgttagtcggatctcacgatggcagcttgcaacacgaggggctcggcgtcttgcttgccaagcttgtcaagcagtcttgacaaactacgtagttcctatttggcattacccggaagccccgagacactatgcgatacaatgaatggcaagactcgcatgcacgcatctaggcatttcgatattggggatcctctaatcctgacgtcgggcgatgggatgcttcttcgaaaagagccgcctccagctgtagtagaccgcagcgagggcgatatggccacccaaaaagtatgcaactccaagcgaccagctctttgcctttttagcactgatggcgttggcaaatacaggaggcactagaccccttcctccgagttttccaggtcgaaggacctctgatatttcaaggaggacggccgtgtcatgggccttcagggagacatggcaagatgaggtcaggtcgacatgaacaaggcaacaggaccaaaatcctacctaccttggccctatccaagtttttgcctagcgacattagttctcgtcgaaagttgtccaaggtgtctcgcgtgtttcttcgttcggtttcgagcgtggcgatacgggcggaaagatgcgctagcgaggtcctgtcggtattcaccgcaatttagctcacgccatcctgttggcaagaggcactggtttcactcacaagatctcgaccccttcgtcacccatcgcctgtcttgccttggtctccaaccgcttgtccacgccggctctctcgaccaacacttctaccttggctccgagtgccgcgatcgcttctagcatcttggtctgcgagtgggaaatgatcctttccatgatcgaaaccttggtcttcttgttgtcatgtttcacgcgggcagatagacgttctatcgtagcagcctgagccgggacatgggatgcagcttagtagatcgccactaccagagcgatgcagtccgcaacctactagatcttcgtcaagattatcgtccacgaccgctggcgccgatttcgcttttagccggatgggttcagggtcgccgtccgtttctggatccagacagacgactgtagggtttgcaggtagcgttcgattcagatcagtaccgggacatgtgcacgatcctaagagccggtctgcttacgatagaagaagctcgaatcgatgaaatcattctgccaactaccgccttcgatgagtttgccgttcttgagaaaggctgcgggtctcggattcttgatgactcccgtatccctctgttcctcggtcatgcccctcgcaagcacgtcgtcctcttcaagagggacgaggcaacggtccccaagtcgaccaccatgcctagctttgctctcgttatcgacgacgacgaaatctttcaacccggcagcggcgatcccgtagcccattccgtatcccttgaggatgttttccttgacgatcccgccgaaaaacaccgactcggtgtcgtccgagaggattgacggtcccaaaccgattccgacccggatgagggtgccctcgtcggcctcgatggtgttgccgaccactcgcgtgttggtatagttgccctcccatggaccataatcagacagcaagattccacccatggcattgcgatttgaagccctgatgatgttgtcgtctatgagcgacccgggagacccgtaaatgaccatcgaagcgtcggtaatatccaagaacatctgctcggtgtcgaggaaatctcgtcgtcatttaagcctgcgtcccggaaatttgggcgtgcttttctcgactcacgttccctgtgacgacgctctcgagacaagccaggctcaatcctgacgccaatgacctgcccacgggcccatcctctgaatcttccccatccacgctctcgagccactcttctccagccggtccctgttggcgaggtcgagcacggtctcgtcagttagtacacaagctgcgtctcatctctcctggactgacaatctggttctccgagatcctggcatttcgacacgaaagattgtcgccctctctgacttgaatagctgtccatcctctatcgaaacgatcacacactgatcgtcagcggtctcctcgagccggacgcgtggaggggcctatccgtcagacgacgctcacctaggatccttgaccacacatttactgacgacctgcccctcgttgttacccagcaagatcaagggtgacgtgctccccgagatctccgccccatcgtcttgttcttgcggtggtgtgatgcctagctgttgcggatcgtctactttcgacgctccaccagccggatccatcgacgaggcttgaccttgcaatcccaattccccctcgtgctgtttcctcgcgctcgcttccctcatctctaggtccagctcgtccccgtccccgccatcatcctccaactcttcgctcgtctgcgtcaagagcggggagacggccggatcgggatctggatcgggatcgggtgtggattcgcccggttctcggatcctgcctagggtcgagcgattaccatcgatgatcaggtttttgatggcgacgcgggcacatcgtcggcagtctcccctgtggttagacacgcagcatgatgagctatataagtttctcctccgggggattaagattcaaggaatgagggagtttccactgactggacggccgtcccaccgcgtccaccgacaatcttgatgatggcctttttcgcatcatcgtccgggtacccctgggtagacaactcttggttctttcccgtaaagatgatgggtcccgtcagatgaatctcggtcgattgacatagctggatcctggttgtcggcccgcctgtgaagtgtaaaggaaagacgaggaggtaggcatggagcgggtgtcgttcttatcttttagtagctatcaattgagattggagacgtggacgttggaggtgggtgcgagcggttcatgcgtaccttcagagaagagcctgttgatctccttttgatccaccccagagagacatgctgaaccgtctccgaggtcgtcggtgtccgtctgggcagagaccaaggtggaagcgctgaggatgcatacgaggatttgcaagaggaagaacgaggtgccatcgaatctcgacctcttgcggcgtgtaatacgcgcgttgatcccgtccatcggcgatcgtaccagggtgttcaaccgaaatgtgacgatcgattacagttgcgaggtagaacgtgctgcagagcgagttgtgtgcgatgttccaactatctaggtctcgcatctgtgatctgtcacgacatctcatcccatccgaatgccaatatgctaacccccacttgtgcgctagttggaattgatacaaaagatcaaatcaggaacaaattgccgagagaaacagggcaagagagaaggcgagagcgtgttgagcgtcggatgcaaatcatcggatgagctgacggcaccgcaggagctacagggcgtgagccgagatatttacttccggatccggcgagcctctttcacgtttttgggtctgcttggagtctcagctcaggtcaaccatcaaacgtacggacgatggctacacttatcaacagaagcaaacagggcaacggtcaactcgaaccatcaaaggtcaacataccagctcaatcaggtccagcggatactcgcaaacataaagccgaaagacgtggtgaccatcagatcagcctccctgacatggccgagaattaccagaaaaaggagctgttgagcctgatggctcagccggacaacaagtgtgagcacgctgatcaaacaagcccactcccgtcgatcccgcacgaccggctgacacactattgacggccctctgttcaccagcttgtgtcgactgtggtacccctagtcctcagtgggcatctgtcagttatgggacctatgtctgcctcgaatgctccggagctcatcgaggtcagtcccttttgccgcacccgtctcaagtcccagagtacctctgtctcacttatatgcctgccgaccctgaacatacctaccgcgcgtaatgacatcgatatcacaggtctcggagtccacctctcctttatccgttcgctgaccatggacaagtggtcggaagaccagatgaacaagatgcgcgcgggtgggaacaagccctttcgcgagtttatggaatcttacgggcccgaggggggttatgtcaagaaacagagcattgcggaaaagtacaagacgtgggcggcagctcaatatagagaaaaggtcggtctcatgcccccttgctctagggtcattggcataccgtcgtcatgtcggagcgctaacgatcgggacccgatatcgaatcacagttgaataccgaggtcgccggcggggaattcgaaaaatcctcacctcccgccaatttcaacaagaagcccaccccactcgccagcaacaacaataacaactcgagcggcaggaacagtccgatgatgaactcggtccgagacggggggagcaggaccgctagtccgttctcgggagctgcgaatggtgaggctgggcaggcgaggagcaggaacgagtcctttttcgagggactcggggccaccaacgctggtagacgggatgacgtgcctcctagtcaaggtgagtcccctttgcccaatgtgtaacgagacgatcgacccggctgatcgaccttgacctcccccttcccctcaaccccgctccatgcataacaggcgggaaatacgtcggattcgggtccgcacccgccgaacccgcacgtggcaacgcttcgcacccctccttcgccatgtcgtcccataacgctccttcgctccaggaattccaggccgatccattatcggcgttgacaaagggatggggcttgttctcctctgccgtggccgcggccggatcgacgatcaacgaatcggtcatccaacctggtatgaaacaagccggacagaccgtaggcgagctcaacgagcgtggactgggacagctaggggaacagtacgggaaccaggggaaagacttgacgggcaagtttgcagagcaggccaagatgaccactggatggttgagtagcgtcgccggggaaggatgggcgagggcgaatcaactcgccaaggagcgcgctggggtggatcttgatttcaccgatcgattgggacatctcaagtcggatggaccgaccaagtatgaggggtacgggcaggtcggttccagcggtcggcatgcggaagatgggggatggggcgagtgggacgatggcaaggctacgtcgggcgggtcattcagggacgacgttcccgagccaagacgatcggtggaacagcccaagaacggcagcaatggtagcaccaaaaagccgcaagacgacgagaattgggacgaagattggaaggcattctaattcaggggtcagccgggggactctcttcgctgaggtggttgtaatactggggttgtctttcccttcgctcttgttcggcgctttcacacgcttttaattgctctgatctactcgcgtggaaacgtttgtcgtccggctagagacgtgaaatggccttgttttccccgacgtcccgagtgacttgggaactttggactctgtcgcgcaacagcaggcgtcgacgaatgatatcgagagcgtattgtcgctggctgtgagctttccgtccagaccacgagcacaaggatcgagccgaaaagactccccgcgacatgcagttcgatgtggtcaccgatacccagaaatgatcatctccaagctgtaaaacacctcgaaaggggacgagttcatgcccagctgaaggacggccaggtgaaggaggctaacgttcagatattaccgggaacttcgacgcagtctcgccggatctcttccacatggcgtcaaggaggacaaactttcatcccattaaaaataacggccggtccatgtcaaaccaccgacattggctccctaggacatgtcaccccgagcggatacgtggtgcgccttcgcgactcaaaactcaaaggtcctgttcaagtcggattccaacaacttgcgcatgccttcaggcaagatgggctcgcccttgtcgtcagcgacataacctgttgaagcgtaacgtacgatctctgtcaggcatgctttcgacgcaagggtctcttccgggcaagacttacggaaaggcatctctacgctctctcgggggttgaaggtgatggtagggtagtcctgcaggtacctgtcatgagctttcggtccgacgggggagacagtcacctgcactctggcttacgacgtatttgatatcctccagggggactaatcgacgtcgtttcagtcagcatgatccccgattcgcattctatcggctcgatggcccgatggactcacttccatcctctacgaccagcttggtgacgtgcagtgccgtgtccgtcgtcatctgtacctctctcagatgtcgaccctcgaaccccatggctctcaactctcccgtcctatcccttggtgggtcgtcacccaggattcctccaaagagaaagaactcgaatttgcccgacttgccgtcttccgggcagagcgccttgggtgccttggggtccaagagacagaccttggagatgggaatgggaggggatgccgaggcgaggtaagtgaggatgctttcctgcgagacgaagaatttggccggaggtttcgatgatgaagacgacgaggaagtgttcgaagagacgaccgtgtcgagctggttgctgatggaagcgtgggtcgaagctgagagcgaggtgaacccgacggtcgagcttggggaagcgaccttgagcatctgtccgtacctgaccttaagtcatgagcggcgattcgaggagagatggagacgtttcaattctcactctagcaagacccaggggggcagtgtccgggtagtgtcatcgtcctcctccatgtgttctggcgggatgcaagatagactaaatcagagggtggacgctggtgagaggctagcatatcttgtccttaccgatgatgtatttgggggccgcagcttccgacatttttgggaggtcaaaattccgtgtatgataaatctcaagatttgtgataaccaaagacgttgaagagtcagaaagatttattgcgaatcgcatgtaataataccggtttggacgagctgaaagaacgaagcttgagaaggttcgggatagggcgatcgcgagcaaaatctacttccggtacgctgcctaaaggtgacgttgtcgacacactggaccgtaaacatcctctacgaaaatatccactctcctcgtcaaacacttgacttgacccatgcctacccgaaaaaaatgcggaagcgtaccggcggtgtggtgagtgttcgaacatctgtagtggatgtttttttgtgccctgcatctgataaggcctttttgcaagacttgcctgtcaatcgttattggtcttcgaccagatctcgatctcggcctcgatagcgaaatctagtccccatctgtggagtccacctcccatgacgcaagatgccagccgaactcgcgatcctattctctgataatctgtattttggtctccaagtcgatggtgccacactcgatcggtacaaaccggtgaaattacaacgctttccttccttcctaacagtcatgcagtgatgatagcagtagtagtcatctcaaaagtcataccctttgccctcgtcgaacaatccggaatacgtcaggatggtcccgtagatcaacccgcctccgatcatcgacatccagcaggcggcgggttcgacgaggttggcgtgcgagaacaagaggggttcggcgaaaccggccacgaccaggcaaccggtgagaaagtggccaaagtcggtgtatgaactgtttttcacgagagtcatgtagaggagaaggcaagggtatggtcataagaacgggatggtcagcctcgagctcgatcccatgaccaaggtcccttgggtgacaggggtggacctgggaggggagaggtgactagagcgactcgcctgttgtattccggagaaatgtcgtcggctccagcaaacctcgagcacaacgagttgggtatcggtgcgatgacgaacgttgccgctatcgagtccgccgaattccccccatcacatcgtgggtatcagctcgattttgcaatctgcagcggtatttgaccagactttgttgctcaccgaccaggaggggcaaccagttggcccatagcgcacacgacaggatgacgagtaggaagcccatggcgaggacaaaggctagaccgacgacggctgtgaaatcgagtccattgagcggatcgagagcgtacatcaatcccatcggggcgatgacggataattcagtgacaaggacgaggatcagccttctaacggggttggcggggtgctcggtgtgtgtgaaggcttactcttgagtccagcggagaacatgacgacgggtctctttcggcgaggttcggcttctcccgacacccgtacggagcgatgcaggtggcgtgtgcaagttcctttgactaatttttcgacaaagtccctcttaacgagcgatatgagcgggccgttacgatccaacggcgatctcgtgaacactcaccgacaagccggtggttcgaccttgaatgaaataggttgacccccgggggaggggggatctccgccggggccgatacgcggacggacatccctcgccgggtcgggggattcagaagcgtaggaatctgagaaaaacagtctaatgtccgtttctctcccacctcgacctcgacctcgccctggatggggcacgatcgagacaaatctacatgtagtgtaaacacggtaatccatgaacctaccgtgaccaacttccttggtatcacttcggtagaccttgcaagatgaccaaacactcacttaaaaagcttcccgctaggcaagccatccaggcgttacgtgtaggagccggggccgagtcgttgcctagttcagtcagggcggtcgggttgagctatgtcgccgacatgtcgggcaggggtacaaagtgagtcgactttgacggcatgtgcagaccggagttgtgtcgagaagacgaactcgccggtaatacagagaaaatgagctgattgcctacgcggtctcgctctcacctggcagacaattcacatcgacaatcctcccccgtctagcctactcgaaccccgaggtccgattccacgtcgaccggaaaccgaacccgcgtacgaaagccaaggatccagagatcattgagcgagcgagcaaggctgccgaggaagagtcggggtccaaggaaaagaaggagaggaggacgccgaggttgacgatcgagtttggtgagtcgttcggcggtccggtcctacttggcgaaactatcgcacagcgttattgaaacatgggaatttttctatatgacggggattgtagtgggaggagcgaacaagacggtcgatctgacggggatgaagtcgagcagcatcttaaaggctctccaaacggcccaggcatgaagatcgctcgtcatcgctgcgccattatattccaatcagaacgagggttgtatcatcattgcatatcaatagcattcacaaggacctattcaggacgttctggtcgtagccatgatgttgggtcacatgctggcgacctgtaaacaagttgttcgaggtctgtaacaactatcaagccggggaattgcaacctttccttccctttctttcgagtttcacgtgattgtttgctttgttaccgagccgcgagatttcgatctcaacgagcatcccacatgcaactatactctctcgcacaacctcgataggcaaatgggcgaaacgttcaacctgatctttgtcgtctggtttggtttgagagatcccgctttaacaaacacttttgtaccactacgatattgatccgctcgacatcttcctggtcagaagattcgtatagactataaaagacctcgtcaacatgaccacctctctagcccaacaactccgagggatcgcctctctggacgccgaccggatcacctcgaaccatggagcgcccagcggcaagagctacctcttccctcccgctcaagcggcctcgatggatctggatgccatctacaatgtcgcggtatcagggtacgaagagctgctcgaggtggacccgggcatggaacggttcgaggacgatttcttctcagagacgagcaaggcgacggacaggatgatgttgccaaaggagacgaacagggaactcgatgtcaaacttgaaaaatgtctgagacggctgtcgcgatggttggccttgaaatcaggagccaagtgtttcgaatggctcgtacggcggttcaggtgagagcgggagcgagagagagagtgtgtgttttatcgtttgtattaggagacgatctgaccaagtctccttctatcgccagggtccacgaactcaacgtcgatgcggtcatcgaagctttcctaccttatcacgattccactcaatttccccgcatgctcgccatgatccgactcgagggtaccatcaaatctccctacttcagcctgctccatcctcttcaaaaagcacctcaaacgctggatcgttcgcttttgatccgctacatgtccccggccaaggacaagtcgctattcatccttcagagggtgttggctctactgcccaaagcggccgaggaggatgctacgcacaggaccttgttgaacttttggggagccatcctcgtagagtttttagaaaagattagaggggaaggcggagtgcccgaaaacgtcgtcaaggcgtcggtggaaggtttcgtcagggcattgacagtggaacgggctggacctgatttcgccgtgagtcgtagttgttgtggtaccgcatcccaaggtagatgggctgatcacacgctacctcgcatcatcccgacagcccgccatctatgctcctatgctgctcttcgtccggtccatccccttggcatcggcaccttacagcgccatcatctccagcatcgccatcaacaaggacgtcgacatggttcaccgcatcttgaccctgatgatctgcctggaacacgctccggacgcatggaggctcgacctcggacccgattgggagcggatctttggtaccaacaagcaccaggaacggatctccgagacggtcattgccagcgccaagcagtttagtctggagaggagcttgaaaatgttgacgagttggaccttgcgacgaccggccgcgggttcgtcgatcgtcaggaacttgatcaacgagacggacgtcccggtcgtcaacaaggccatcgccaagcactgtagcagcgtcagggagggagagtcgagcgaggataccactgctaggcagtacttgaacagtctgttggatcaacggcatcccgagatcgtagcttccgccatcaaggccgcaggggatcacgcccttttacccaaggggcaatcgggcaaggcacgaagaacggacgagatggacgtggatatcggggaagccgtcgatggggatgatgtgacgatggatggcagtttggacgaggatgagacctctccgttcatccaggccgtgtctgcggacctgcctagccggatccaggggatcgaccagctgctgggcgctctagacactttttccccggaggagcgtcaatcgattcagatgatcctcaagggactcttgacggaaaacgaaggcgacttgatcgagacgatttacaagcataccgatgcagttacttcgctgctccagccgaccgaaatcgtagacgccctgtctgtacccatgtacaagggagacaccaagcgagacgttgtcgtcaagcacgtaaaattcgccagcacgctgccgactgcattccccgacgagaaacacctccagagcaagatcttccgacagatcatctttcccgtcatgatctttactagatcccgcaaggttaccatttctgccgcttggaaggcattgctggctctacccgcgggttcggtgcctcctatcgagggggtcgaggctgtctttgccgacgccgcggacaaggatgccgacgagaataccaacaaggacaagatcgacaagattgccactatcgtggctcgaaacttggctcgtgaatcgttggcaaccgggaacgccaaattcctcttggatcaaacggcttcgcagaacgatatggtccgcgctcacgcgctctttgtcgtgtccaagttcctggccgagatcggacctaccgtacaaccgttcgttttgtccgagttgaataaggtcatcccccgatggcccgtctacgaggacgtcgaggccgccctcaagcctgcagaagttgccgaccggatgtattcgaagcccacccaagccaagacccttgcggctttgcaagaacactgtctgacaggtatccgacacatgaaattcgcgcctgccatccgacactgggtcatgccctctgatatgaacgagctcgagcccgtgaggacggctctgaaggggatttacagcttggtcaactctagcaccctttacccggcgacggctaggtctatcctccattccgtctttggaaagctccgcgaacgatcactggtattcctcgcagatacctggacggacgagaggcaacccgtcgacatccgattctgcgccgcaagtcatggacacgcctatctcgccgcctgcggagatgaacacgggaaatctaaaaccgacttccagtgtctcatcccatccgtattgatgcttttgatggaggaggaaaaatcccttcgggaagccggtgttgctctgctcaagcagattcacgcaggcatgggtaacgccatcgacgaaatttacgcggtcgacgatctttacgggcccgagacctcgaaagtcaagcttcttcaagccaaggagtcgagattttacctcgagaccctcctgagagaggcggccggtctcatcacggacaaggattacttgaccgtcattcacggccgtctcatccaccctgctaccgccgagaacaagaaggccgccaatatctgccgtgcagtcatcgcttctttgacatcgcacgttgtcggctggaagttgaatggtccccgagtcaagctcttgcgtagtctcagccagatcagcgaagtcaccaagctcgatggactcgtcagcatcttcgaggagttggacgaccccaacagcaaggagattgcctgcctcaagcgactctcggttgccaaatccaactcgtacctggttgccatctttgacgtcctcgatcacaccactgccaaacagttcgccaaggggaatcatgaggaattgttcaaagtcattctctccctggttcatcgcaacatacccgaacgggcaggtcaggtctcggacacggtccgagaattgattttaacccgattgaacaaggatgtctttgcgcaactcggacttttgcagcaggaacagctggtcttggcagtgatcgagggattgccctcgtttggcgatgcgtctcgaaaggcatgcaaggctttgcttcgagacatgcccctcggaggagatggactcctggacattttgcgcaaactcagtgaagtcaccgaaccggaagacatttcccgcaacaagcgagcgaagactgaagacgctgcggacaagacattctccatcggacctcttatgggtttcttggaatcaagaaactcttcagacattcccgtcgatccgagattggtgaccctcggtctagatacgctcgctgtgattcttgaccataggaagaacatagacagcggttcggccgacttcgtcgagcagtcactgttgaccttgatgatcaatatcttggatcagatccaggaccgacgccaattgcagaacgagtctctcggcgtagaggttctggtcaaactcattaggagctcgacgaacccacgaacgtctcagatggctttgctctttatcggaagcctcgcccgactggtaccagacgccgtccttcacaacgtcatgccaatctttacctacgtgggatcgagtgacttccaacgggacgacgcgtatagcttcgccgtggtggagaagacggtagaaagcactgttcccgtgatcgttcaatccatgcgcgagaagaccagcagcgagctcagcctctttatcgaggctaggcctttgttgaggatctttgcggatatggctcagaggcttcccaagcatcgaacactaccattctacgttcacctcgtgacctgcatggggatttcggacttccttgcccccatcaccatgctcctggcgaccagcggaaagaagctcaaggtggacagcgactcgtcacgtctcgcaaagtcattgatagcccgattcgagccggctatccgtttgcaggtgagcagacatggctcgatccgttgtcgaggcgaattctgatttttggttgcggatcaggccgtgacgaacattttgagcgaggtttcgaggttgtcttcgatcaacgacgaagagaaccagggtgccttcctgtatttcggcgaaaagtcagtctttttcggtgcgaccggacgtgctgccccctctgagcttctctttccctcttccgcagtgccgacgcctccttgggaccaagggcttccatcatgatggacattgtacaagacgttctgcaagggttgaccgcctctcagcaagaccaagctgctatccgaaacatcattgggcaactcatcacactttctgccaaatctcgctcggactattcggtttcattcgatagcaaggtcttccagaccgaactcgcggcgacgctggacgctgtcttgcaaaagattacagtagacagcttcatcagcgtcacgcaagatctgctatcaagacaacaggcagctgtaggtacaacaacccccttcacatcgaagaacagtctgctgatgggcgttccaattaatttgtagctcgttgcccgtgccttagatcttgtcgtcgagcgagtgcctttgatcaggagtgatctgcgcatcagcctaagcgatgtgatgacacagatcttgcaggctgcatacgcgatcctcaatcgtactgaagcatcccttcaagtcttggccatcagagccatcagcgctatcactaggatcgtggttaatacggaggacgttgttgtcgcccaagcgatttcaccgcttgccaaaatcgctcagctcgagagcaatggccccgaagtcttggccgcaatggacctgctggtggacttgacgtgagtttacggtggcttagacgacctctaatgggtgcgccgctaagtacctggctcggtcatagcaaacgattggagagcaggatgattccccacatcgcggtgctcttccagttgagccgcgacaagctagcgtcgcagactgacgagacgagggtagtcaactcctctatcgacctgattggagctgtcgtattggcggtacctactttcctggcgcctactcagcttggcgactcgctattatctgctattcaggtggacgtcggcggctcagggaagcacttcgacgctttgatcgctagtgttgcaaaacgtgttcccacgcccaatttgctccctgtggttgtctctctctggtcacggctattgagcggatccgacaacgtaagccgtgtccaacggctgggcggaatgcagatggtgacctattctttttatcgcacaacaggctctgcagaagtacttccgcttggttcagaggacgatccgtcatgcgagcaaggcttctttaccggcccttgtcaaggcagtctttgcgttgttcttggacgccttcgatctatgcaacgatcctgtgcatcccaatatcacggaaagcttaatcctgccagccttcttggacatggttgagaagttgaacgaagcaacgttcaagccgctctttggcaggatgtacgactgggctgccatcaagtcggacactgagccgcaaggtgagaaagaccctcaagcgagccaggacctcagactgactctgccacacgtctaaatccagacgacgacgtgctgtatcgacgcaagatctctctctaccgaatcacccgcggcttgtttagcaaattccgagtgagcgtcgccacatatgtgtcttcgtcattgtgtcttggctgattttgattcaaccgtcacagtcgatcatgaccccctatctcaatactttggctccgctgactaccgagatcttgagcgccgcggcttcgcggcccgcgaaggataccgagctctggcgatccgttattgcggctttgaccacatcattccaagtcgatgatgcgggtgagttgaccgccgtggtccatccaattcgatcactgacttggcttgtacccttcacatcgttagttcactggaccgaacaacgataccaggctatcgtgcccttattggtatcgcagatcggaggtctgtccaggctgaagtcggacaacgtcaaggaggcgcagcatctcgccgagtgctttggagcattcgctggatcgactggctcagagagcgtcttgaaatctttcaacatggccatactcatgacgacgcgttcggacagcgccaacgagcgattgatcgcgttgatcgtcttggagaaggcatggcagaaccaggaggaactcgtgcagttcgccccagagacggtcgcagagttcttgagcgagtgtttgcaggacgagaacggtgccgtcgaggcggcagctcgaaaggtcttgaagcgaatcgaaggtttggtaggagacttgtctgcgtacctagaatagacatttttgcagcgatatgcatctaatctttgacacattataaatctcgtacaacccaagcacaatttcattctgtaatgttatggcgatcctcgttgcagaaacgcacggaactgctcgcgaattgcaatgacatcgccgaccgtcagtccctcaaagcgtctcgacttgtttgcctgcaattggggcacgtattgcccttcgtgggaaggttgcgcctgcacagtacgattggatgccacttggcggtgtgtagtcgacttgtcagccacccgatcaacgccggatactggaagccgcttctcagacggactcgctgtgggcatcatcgtcatcgtccccagaagctgattttgcgatctgcccggtacccgggagggttttgccgtgacctcagcgagctcttcgggagcatcggtttctatttctatgctcgccttcattttttcaacctgttcctcgagcagtttcaacattttgattctttgtaggcgtttgctctctcgttccgacccttcgatatcaggagggttcggcgaggatgtgggtgcttttcgtttgccgagtatgctcggcagcgtctcgccttcgtccgaagaaggcgtgtcgagcgggattcttttcacatcaggtcgccggctcggtgtcgtgtacaccgtcgtttggatcggactcgtagctgttgcttgaggaggagtcgccaagcgtcttgtcggcgagatcgcggcttgaggctccgctcgtctctgcgcatcggcatggtcggtcggaactgtctgcgcctcctgctcgatgacggctccctcgggttcgtcatccgagggatctaccaacatcccatcgacttcttccgccattgctctcgcttcctccctggcagggctatcccttcgcaaagattcctgctcgacgaccgctttgtgtacgactctcggtggagctggcggagaactcgcccataccggagatgagctcctttcctttttcggcacgagaaggggttccggcttgagaatgaccacggtctcgccctcgctctcgtcatcgctcaagctttcaccttcctggatctgcgggtcgtcgctatcgtcttcgtcctcgtcggattcaggctgtgaaacgcgcgtcatccgcatcattctccctgccgctttgggatgcggtactggtggtgctgcctttcgtggagcggctgggggtccgcggaaccgctgtgaacgtcgatctttggctttgacgggcggtatatccttctcggagtccgagtcgtcttccgtctccttgtccggatctagaccaaacactgcacggaagaccttgccgtgagtatgcctttcgtaccttatgagtgagcgaaagatccgagatccaaactcgcctgttatcccatccaaaatctttgcgagaccggcctccccacccatagatggagcaggtgtgaaggcccagtccacgtcttttccctcgacttgcctcttgatgagcatctcgtacaattccattctgtccatcccgccagctcgaagtcgctctgcgatcgggtccggtgaaggcggagaaggggtcggggtgggcggtgtcagattgctgaggctcaagttgggcgggagttgaaatggaggggcttcgtaagagtttatattcggcggcgaaggatcctgtccatcttcctggcccgggtcgacgctatcccgctctcttcctgtgccttgctgtgtgcccgggttgacagccgcggtgctcgagaccgacggtgtttcgagattcggtcgatgctcctgccacaagatggccaagacggccctagcgtccctcctgaccgtttcaacagtctttcccgctctgccctccttgaactgctcgaaaatgtccacctcgcccgtgcccgtctcttcaacttctagggatgtcttgcgcgctcggtgctccttggcgtaccggtccagcgtcaaggggaatcgcatgtcgatggggtcggaacagaaggcgatctcgctcggactaccccaaaaccaatcccatgatttcacgtgtaactcgagtaacgggcctaaagatagggatgccggtgccgtggacggaagtgatagtttgtattcggtcagccggtagacgctccgaaggtcgctggtcatcgacttttggcgatgcctgcacagcgtatatgagatgagttctggatcgtcgagacgaatgtgagtcgatcgaaagcgactcactggcaaaaccggaccgtgctttccgggtcaaaaaccagtctcactcgatgaaccttgtccgtgccaagcgcgacgatctgtgtcgtatcctctgggttgcccatatctctatacgtctcgaactgttcagagaagggatatggcgcacatccggtcagattaccgactcttcaacgatcaagacgctacttacgcgagtgatctggattttctttccatcccggtaagtcttgtcgagatctgtgccatggtgtatataatggttgtccacgcaaggtgctatccagtcttgcaattcctgcgccatcgcgtcaggctcgtcttcccagtggtgggttccttagcggctacgagacggtatcatcgtcgacatgagtgatgacgcagactagcgatttgggcgtatcgatactagggtcgctgacctcatgatcagttagttgtaggtcgagcatccctattttactacaacacgagcagacactctgaatcgccgtcgagggaccatgatttcggaagcgaattaacatccgagtccaaaaaaacatccgggacgttcataatttgcttccgtaatgcgcgtcgcgtcaaaggggccgtttcgtttgtcgccatctcatcatcaatcgactgcaactgcaactgatcatcaacaaacatacaaatacatggaaatgtaccttagccaggtcgtaccactgaatcgcagctcatgctcctcatcctgcatactcgaacagacgcaccacagagtctagacggatgaaaacgaatcaccgcttatcacgaacgagctcgtcgacacgctctccgtaacgcaaacgcgccgcccaaagaaacacattccgacgcatcattctcggacacgaattatctcacctcaacgtattcaggataggggagcaaggagaaagggcatatcgacctcgacgcctagagactagaagccaaactctcgctctactttactcatcatgatgatgtctcgccagcaacacaatccacagcagcagcagcagcagcatcatcagcatcatcaggaacaacatcaggcgtattcgacgatggatgtcgacgaggatgagctggagaacccttacgacggacgatatcgaccacagcctcaacaacagcaatattcgccacatcagcagcagcaacaacagtatcatagccaacaacagcagcagcagcaacaacaacaatctgagcaatatcgctcgccccagcaacacatcgacgatccgtcgtctcgaccgcgtcagaccctgtccatcgatacttcccaagccaattcccaaggctatgggagcggctacaaaccccagcagcagcagcagcagcagcgtgctcatgcttcgggacccggctcgaccgatcaggctggccgacgtttggaccaggcgaatggggtaggatcgagagtgaatggaacaaaggacgagacgatcatccttcatgacgacgagcatcataacgtcaatggcaatgtcgacaacaatagcaacgacaacaatgccaacggtgcaacgaatgggaatacaaacgcagaggatgcgtacgaagacgatgattacgccagctcggaagggatgcctgatgaggatatcaactttaccttgcattacgctttgtgagtcatctactcatctatccctttggcactatctctggccgtccacaagttctgaatgtcggcctactccctgtaatcgacatacagacacacctttatagcgaccgtcgagggtcaagcgtcggtcatgaagggtgactcgttgatcttgctggacgataccaattcgtactggtggcttgtcaaggttctcaagaccgaggacgtggggtacattccagcggagaatattgagacgccgttcgaacggttggctaggttgaacaagtatcggaatgtcgatgtgagtcggctgtcacgaatctaccgggtttgtccagaagggcagctctgacgatctctgccttgtcgatccgatcgtggggatggtatcgtctccattatagttggcagcagcgacaatggaagaacgacatcaagccctactcgactcgcatatccaagcacagatccatggccacgaattcttgtcgcagcaaatgaagaaccagcctccaggatttggagcgccaccgcttcgaaatgatcagaaacagtcgacgaggaacgatcgcgatgacgacgaggacgacgaggacgactatgggacggacgagaaacgtcgggtcatctttgccgagccgacatatgtcgatcatcccggcaagacgtggtcggacacgagcggcgaagagagcgggtcggacgaagaagccgggagcgcggacgaggtagatgctcaagcgggtactgggcacgatgatgacgagggtcaagggagatacgaggatgaggagagcgaggacgacttcgggaccgaggagggtgtcgcctcaagaaccacaaacgaggggtcaaatggacagattcgagagcagcggaatccggccggagagcttgttcaaggacgggggacggggagagtgactccggaccggtacgaagacgcgcccaccgctgcaacagctggagtctcaggggcgtccaacggagctggggtggacccggacgagatggagcctgatgacggaatggaatgggatgagacggccatcgtggaagagagggagcgtcgacgtcggctcgcggaagcgcaacaacgagaactcggcgtcgccgcaggtgagccgtctacaaggtctgtgacctcgtcctctggagtcagggctaggtcaggatcggtcgcagcgccccaacgaccgatggtacagcaatcaccggcccacctcgcgcatcaaggccagagtggcctggtcggcgagacgaggatggatccggccgaactcagcccggagcaaggaccaaaaaggatcaccgtgactccggccgtagctcaaatacagggatcggcaccgaccttgttgggcccgcccgtaaggatcgagagtcggatcgtagatgctgggaaaccgcgagcacaaccgacaaacgttcagcagcagcaacagcaaccgcccgcgcaagtatcgcaatcgcgccaaccccagtctgagcaggaaatgagacagcaatatcagcagcagatgcgccaacagatgcaacaacagcagcagcaaatccgcggccagcagcaggaaccccgtcaggcgaacagtcagggacccacggcgaatggacgatacgcaggaccccagcagcaaccgcgagagagggacgcgagtggtgcttcttcccttggcggcacttcgatcaatacccagggcagtttcaggagcatgtccgcctcgcccgaatcttccctcggccgggaggaggacgaattcggcaggaggacaggcaaaaaggacaagaaggccgatgaagagggaaggacagtcaagaagaagcgcagtggtgtcttcagtggtcttttcggcaagaaaaaagataaggagaagaaaaacaaggatgaacgatccgcttccacgacggagggtagttcggctgcgagctttgaatcggaacgtcaatcgcacgactacccgtcgcgtttgcaaaactcgcctgatattcggatgcccaatcctggacgcgtgatctcgccaccgatgcgcatgcaagaggagcgcagcgggtccccgtttcagctcgcccgacctacctatacgtctggatctggtcagaactcgccaagcgccgtttccccacaagggattcgactgcagcagatcgatcagcaacagcagatgttgtaccagcaatatatggctcgatctcccggctcgtctccacccatcgacgcctcgaaagcatacggtacccaagctgccgcggcagtggctcagtcgtcagccgctcagcgactcgctagagcgaccggatcctacaccggtggaagacctggtagcatcattttaaacccagccaactcgcatgggggaccgctgctgaacgtactgcgcatcttcgcgggagaacatgtcgatacgcagtataccttcaagaccgtcctcctcaatgagaccaccatctctcgagatcttgttaaacaagctctacaaagattccgcgtcgaaggtgttcgtgagggtgatttggaggattacttcttgacgatcaaagagattggcggcgaagagctcgcattgggtcccggtcagaaaccgctacaagccttcaacatgatgtgcgagagaatcggagaggagcagaatgctttgaccaagaccgtcaagcggtcgtcggtcggttcaatctcgtcgatatcatccaatttgtccatgcatccagctatcgccaaactctcgctgaacgattttagcgacgactcgaatgtcaagctgttcttgaaccgccggccgcgggatagggagtctacgagtcactttgagaattatgggtccgatacgcctccggttcagcacaacgacacgtttgccgatagcccgaccatatctgatggtcaagcttcggcgcgacgagaaaacagacccgctccaatcagtacgcaaggtctcacatcgcccgacatgatcacttcgccgtccgctcgattcactctacatgtggtagccgagctgggcgacctgcctgatggtatggtgtttgaccctcaaagcgaagccgttttgcccagatccatggtcaaggaacgctcggcaagctcccagtcgcccagactacctcccgatgaagcgcgtcaacgataccttttgctgtcgaggacggctacagtcgcggaagcgatcgaatcggctcttgaacgcttcggtatcacggaaggtgttgtagatggcggggacgacgtcgaagataaggtcggcaagcggaggagcatgctgcgagtgagatatggtcttggcgtaaggacacaacacggcgaaggtgagcatatgaattttggtccctaccaaacaccttattctaatcgcgatctccacagagcgagtattacacgcctctagcaagttgctagacgcttacgagacagctcctgtctttaaagtggccgacaaaaccgtaacaaatcgacgacggtcccgagaatgggcacgagaactgtccgccaacgagcacgacctgcgcccgacggatcccatcttctttttgcgacggatcggaccgaggactgttggcttgtcgagcggcgaccagcctccaatggacgaggttgctctgaagaaacgtcgcctctctgatgccgcagctccggatacgagcacggttcgcgcaaagactccccaggaggttattgccgagcaacgcgctgcaacaaaggctcgccaaaccgccatcttgtcaacacatcccaacgccgatcaaggcattgatgtcgtggtagctgaccgcggcgtcgtacggagctcgaggagctctctgatgggtcaggatgaagtccgctactcctacatcagcgaggatggcgagactttcgacattagtcaatacgttcacgacgaatgggtcgatgttgaggaagacaatgatgccaaggtcgaagagttacgctcaccagcctttgagcgcacacaaacggatcagacggtttaccgtacagccccaagtacaccgatggaagcgccggtcccgccggccgattcaagccgttacagcgtcagctcgacgggcgcaaacgatctcttgcatacgatcgtcagaaagtccgagggagaagctggtcagggatacatagccgagaagatcgaccgagtgatcagcaaggtcatctcggacagggatcaatcccaacggagtacgccgacgcttcagctcccgtccctcggccaatcgctggcgtctgtctccgaggaccggactcgagatcagcgctccttgtcgcccggccaagactcatatgggcctgctatacgcgagagtatgatgtcgccccagctcgagcccatcccgtcttcgatccgacaagcggtagacgaagccccgtcgcggagcggttcgcgccaggctaataacagtccactacttgaaggtggtctcaagagcacgaattttgcgagcaagctatctcagcagatccgtactgtaggtgcttcgaggcatcaacgggcgcaaccgtcgatcgcatcgatcctgtcggacgtctctacctctgcaccacgcaaggaaataccgcctccaaacagcgcgtcttcgatcgcagctcgttacgccaagtcggctaccccgctgagcaagacgtggcccaaaccaaaaacacccgtgccaaacaaggacgactttgggtttacgaacttgatcggggtgatccaagccaaagcagatcgtgctcgaccgcccaaaccggagaggccagagctcagcgctatcgacaagcgcttctttggcccaagcctgaccccgaggcagatcaacctcctccctcccggcattcgacgggattaccaacagaacagcaaaaagattgaggaactcgaaaatgagacggcagaattgatgagaaagatcttggtcttgcgagtccaggaacgcaagcgaaaagaagcggaacgaatgcaggaggcagaggatgagcaaggaaacgaaggcacgactacttgatgacgcggatggaattgacacggcttcggcacgatcataacgaaacaggctcttgttgtaataattccggggagaagagtgacccgcagcgatcagtcgtaagtatagcgaatggccgcctcttatcctatgcgttgccacttgatggcacgacttgactgttcccttgctgcgcgacgcgttcgccgaggtcgggaagcgagaaacgtcatattcgcagctcggaccaccccgacgcagcccaactctagtttgagtgtatgtacactcatacgctcgggctgcttagcgtctgccttctatggggttcatactcttactaagctagggagatgcgactatagctgtccttaccacaccggcaagtccgatagcaacatgtcatttgtcaaatggaagagcggtggatcaagcggcggtggctcaggtccagccgctgcggcaagtctggctggacacccagactttactagagcacacctgcgggaccgagaagtgtaccgtctaggacatttgagatcactggggcttcaaggagaagtcactgcgttggctgtagatccggtgtacagcttgatggctgttgggacgtcaaccggactcatccacttgctcggaaaagcgtcctttcaatgcatgatacaactgtcgacgcttcgagaccacaagccagccgccgtgaaatttctgacattcgtacctggagctggaagattgtgttgtatcgacgagaagaacacgctacatgtctggaataccggtcccggtggaatggatgacgcaaagaaccaaccttccaaggaggtcacaaccaggtacgattgcgacaccgattaacggtagtctgccaggctatgctgaaccgagatattgtcgcgaacagcctgtatggagaggtgacttacgtcgatgtcccatccccggcccattcgcacgtgagtgcaacgagttccggccgaagatgatccactgttgacctacctaaatcgcaacatagttgttcttcacccttagagacggcgtaacattggcttacgacgtccctcgccgccacatatctccttaccggatagaaaacctgtggaaacaatatgaagacaggctacgtcggagtggagttcccggaaggttccgagcatcaggaacgtgggtatctgaccagaaaatcgcgacgaccctgcaggcgctcatttcagcagtcgcgcttcgcagaccagaagcagtatgctgtgccatgaatccacgggatctcaattcgatgttgataggatacgaaggtaagcaaaacctagcgagcgcgaaagccaaggttgcggctgttgaaattctggctcgatcttgtctaggcggagtcatacaatgggacatgaaggacaaaacggccgtcaacacgttcgagctgacgctacctccgggtgagttgatcgcagagataggccgagttcaatttgactgagaaagcgaggtatctctcttgtaggtgcacccggcggttctagctatacggaccaggtaagatgtttccgaaggtgatatcttttttacgttgtcgctcacgtagcgttacaataggctatatggaccgagcgaaatcccgctgtgacctgcgttacctttagaccagacggtcttgtctttgcggtgggacatgaagatggctgcatatcgatctggtcgctagaagaacccgataagccactcatggtccggacactgacgaaagaggacgtcaacgtcaccgatgcagagagtctctttgatgcgggcgcattggacactactaccaagaacggccagccggtcccaccggccgtccgtgaacccatcttcaagctagcctgggcgtctttcccggatcgagcgactttgggcaccatggtggctgcccaaagcttggatccaggggttgagccggttcaaaaatcaaccatgcagtatgcggaaaagggggagactttgctggtggtactaggcggttgcatgtcgaacgatcctcctgccatcaacgtcttgcaaatgccggtctataacccacctccagtcatcaaaacagcggttgctgggccttcggagggtctatctattcctggaagaaaggcttacagagaatcgttatcagtgactggcattacacaatatcccaccgcaacgccagcggaagacttcgtcctcctacctcgcaccagcccctacttcaacttgtcgttcgacccgatctccattgtcatctttctcacccctgaagatcgccttccgccagtcaagggaccccacggaaggcgcactgttgacgcctggtcttttccccctcctcggtctgaccttccgccagacgataccggacgcaaagactttcacacggtcaccgatgaagccttgcaaggttacgctatggcggcagtcccgacgttgccaaatgctctcagtccaggcctgtcgacatccgatttgaccagctcttggcgcttgccgtggtcatcatctcctgcctcgccggggttaacacctctaaacggtggcacgattacccaccattcgcagcctgcccggcctttgagattgccttcaatcttttggactggggggaccaatgtcctcgggtgtcaaacattctctctggacaatgcgacattccgccgcttgatagcatttggcatcgaaaccgtggggcgcgaggagaagccgcgactcccgctcagaggcggtacagcggtccctgaccttcacagcaacaatgctccagatgcggccttgacgaagatggaagggtatcgtatccttgctacttggcacgctgatggtgcggtgaggtaagtcgtcgaagtccgaattcgcttggaggcgcatactgacagatcttgggtcgaacaggttctgggatgtcagtcctcacatcctggtcatgccatcgccattgcgctttgagtatccatcgccattacctcacctcaccatttccatcaccaatctgatcaaacacccctccctccggcacttgcctatcgctcgactcttcaataccaatccgacacgggtcaggatcactgggatcgatcttgctcaagctacgctcgagtgcctcgtgcatcttgagtcaggcgaggttttcatccataagttcggtacgacgaaggagaaaccggccaacattgataacaagccgataccggcgtcagcgggaagcgatcaaagctatttcgagaaggcagctgggcacgacgcttacgatggtatagaggacaccgatcagactgcggaatccttgacgtcaactgcccatcttgccaactggagggacgacgggttcaagccggttactatactcaccactcgccgcggacccgttgttgcaactgccatgtcagacattggtgagctgtttccagcggtagccttcttgtcgccacagacttatctaggtcttggtaggcttttttgcggtctcttactacgcgaatagtgtcgtaatcgtcgacttgcgaggtcccgatgttttgttgcgcgagggattcagtgaggaaggtcttaaagtcaagaagaaaaagaagaacagccagaacctaccggccgaatcgagtagctgcttgactttggaatgggcaatctgcaagatgagcggagagagtcatcgtgcacctcgattgatagcttcgtatgcgaaagggtgagaatagtatctttctatctgttgccattattattgacagctttctttgtcgatagtctgaccaagatatacacgctcaattcggtgctgggggagtgggtcgtcgatagcaaggctgccacgttcacccacgacagtctcgccaacccggtagcgaccttcatgctcagctacgctaccggcgaatccgtcaacgctaccgcggaggctttgcggcaaagtatgagcctacaaaacagcatagaacagggttcgagcaaggcagagggcaagatcccgttcgctatatggattgtggtggccaagcgtgcgatcagggctcagctagacttcaacggcgagagaatcgccaaagtggacgttgtcgacggcgaaaccatcgagtcggcgtatatcgttcggaaaacaggcaagtcttgaaaaacatcgcgagtgttgagagcatggcattgacaagcgttgaatgcgttaggcaacaagattttgatggcgatcacaagctccggttctgctctgatatatagcttaccgaccttggaatacatcaacaaggtctcgctaaagctaggttcttttgatgcgtaagtgaccttgacctagcctgacacgtcaaacccggcattgttgctcatttcgagcggggtaatcagacgacctcttggcaaactgtcggtcgatcctaattctggcgattatttcgaatacatctcgcccatggagatccacctacgaactatctttcatcatcggaagcctctcttaccacgagtggacccatcgacggtcaagcatgtggtgcctgctccaccagttccgcagaatgcagcatggggagtctcttcctggatttggggaggtgctcccttaactggagctcaactcgacgcgctaggtaggtcgacttggccgcgatgaggggcattccggctgacactgtgcgagacttgctgcagtcgccggaccaaatcgacctccgctaccgcgagctgctacggctcagaagccgccaaagtccctcgtaacttggggagaggcacctgaacccatcgttcgtgcgaaagcccctgctgcccctcggcgagatccctcgacaagagatgcgcgcgagagaaaggacgtatacactgaaatgactgaagcagcagagaaacgggggtgagacggacactgttgttcaagcgacggttttcctttgagactgacgggtttgcctggtctcgacagtgatattttggagggcctcgaggacaagatgatggcaatggggacggcagcgaacgacatgctaagcgaggcgcgaaaagccgcggtgagtccggccgtagccaacgagtcatgtcgaaaatccttcaatagctcaccgcgagattgtcccacaggccaagcaatccgcaaaggcgacggcaaaggggctgtttggattttgagccgtgaacgtgacacgcgggactgttcaagaggagcgcagcgcattctgcaggctgccatgttgtagaatgatgatgatacacacaaagatgcttgtatacaccggacgcagaaatatgccatgacgacgactacctctactcgtcgtcctcgtcgtcgataccaccccattctcggacaaaggtataaacctttcttcggttggaatccttgactccctcgtcgttgctcagactggccaaggccatcatccgcttcaaaaccgaatttgccagctccctctcggtcgcgatcgatcgctctccagcgccgacggaacactgcagggcaatgtcggggaaccggttctcgacgtcttgtgagccttcttccgtcctgcgcttcttcttgaccggctgttccgactcttccgagggcaacaacccagcgatgaggggctggaacatggcctcttgtagccttttcggcgtggccgggttcgaggtgcacgtcaacaatcggatgaagggctcgacgatatcagccaggggcgcgggggtctgattggggtgtaccaatggtcagccggatcgtgcgcgactgggagcatgggaaaggcaagtcgtgcgcacctcggtctcctccgagacgaccttgtttagctcttccagccagatgtctgccaaatgccacgagatcgaaggtgaaaccttcaggtctttcgagctgttatttcgcggccaaaggagcgatgtgtcgacctcgagtcagccaggacggacctcttggacgaaacaggatcatcagctggacgtacgataatggacctccgatggccgcagtcaagatcccgttgtaccgcttcatagcctctggtgcccatcccgacctagcgaggagtcggaaggtcgcgttctgccatcttcggatcaacatgtaatacttgtccatcctgcggattgtccaaatcggtcaagtcagcgaaagcgacaggcaagggaaccgagaaaggagagcgggagcacgcgcacctcagtcgatcgatcccggtccattccctgacgagcgcttcccagaacccggcgataaagtctagcccagcgttggtcttcgagtcgattccctctgtcgagccgtcgttcacaggttcgatggagagcatgagcgaggagaggtcgctcgcgagacgttgttgtacgagggctttatccgacatccagaagcctgtggggatcatccgtatgagctcccactggtgccaatacgggcatgagctagaggttgtctttcgatcacttacagtagaagagtcctttccagagtttacgcatctcgagtggaggtaacaatcgtttcgaggttgaatcccctccgcggacgacatcgtctccacccgtctttcccgacaagctcaggatacctcctccggacaagaatgcgctcaaattggcgatcgcttgatctcgaatcttcttgtctgtcgtgcagggcgagcggggggtcgttagctgaaagacgacaggtgggtaaatttccgcccgacttgcctgtgtgagcgagttgtttacccagaggcagggtggcctcgggaacgacttcgtgtgctctgcccttgcctttatttttggaaggcatactttgaaactagtgcgtgcgagtgtgataatgttgtccttgtctagaacaagactgtgatgatgaaatgtctacccaccggactttacaactttgtgtaacagcggtttcggagaggaaatcgcgcggaaacaaacaaaaaagtcgaaaggacaagttgacctccacctcgagatcgacggacggacggacggacggacatgctcttggaacgacatttcttctaggctacagatacatgctagcgctcaatacaacgacatgtccaaaacgtacaccggcatgaagatcttatccgcctatactcggggcgatccgtggagatccacttgcgcgttgcacagtcccatctcgaccccttcccattcctcttgcacggccgactcttcctcttcctctgtcgtccgatccgtccgtcctacattggacatgctcggtataggcatccggatcaagacggccacctgaacttgtggtgaagccgccgtgcccgtcacaggtgtggggaccgataacgacctggaacctctcgtccgccccgtcccagagatgacgggcgggtaagactgtgcgctcgatattccatcaccggctgtcagagcagacgtctcccattcttgcaagatggcctcgggcgtcttttttgcccccggtgctcgaaaggcgacggcgtttgggaaccacttcatcggtgagacggggatcggaccgtcccccttgtgtgtcaacggtgtgatggccaatggacgctaccgagcagggacgacaagaaggggcgtcgagtgagcaacgataggatcccatttctgggaaagagacgaccggcgtcccgttcccaacgctaagactcacaaactcttgatcccacaagacctgcttctccccctgttccggctcatacctccccacttcccatccgttatcaccccgtttctccatacccatcgcgcccgccaaccctcctctcggtttcccgagagcgtcccagacctcggggttctcggtcgtcgaggcgatcccacgaaaagagaggatcaacctttccctctccgctgcgtatcctggcatcccagggatcaagagtcccaatcgacgtgcctacccccaaaggaaaacggtcgcgcgaacaaaccgggggggggggggatcgagtttagttgaccgagccgacagagggaccgccctgccccgtcccgtcatccctggtccgaggcggacacccatgcggactcacctcggcaatggacgcttgacgacgttgtcgacctctccaccatgagaacgccgagatgaggatgaagaagcccaagagtcccacgaggatgtaaaagagctgatttgttttccgtgacgcagtgtagacggggagtgtgagcctgtcgatcgggcgggtcgatttcccgggagattgagatgcggaagggagggggagtggggacttacattccggtagactgcagggcggaatcgtccgaccagaccaaacagcaagggacgcgtcgagatgctcgatcgggatcagtacaagaggtcaaggctacccctgaggggtcccgggacgatcattcgtgtactcacagctcgacggtcctgtcgctccgaacccgcctcctctccggttcgtccatgtaggttgaaccgcggtattcgtcggggtggatgatgacgaggacccgagcactgggttggagaagatggaggtcggagtcgatgtggctgtggctgacatggttgtgagtaccgaaagtgtcgtcgatgatcgagatgcgagaaggacggggagataaggatccgaggtcgactgggcactatctcttgctcttgtaccggtttgccggatgagagttcgattctaccagaccagtacgatattggatgacccctgccccgaatgcctgatattcaaagtgtctttcccactttcgcctctttcttggctctagtctatgggaagagaaccgacgtaggtggtcctctaaatcgagatcgatatttaattgcgcgagtctcggccggggtttgctcttgagctcttggtacgggtgcgggtttagtctaaagggtatagacggcttgcggatcacaggatggctagacgtttaggtggtctttatcaatgcaaggcagagtgatatgagagatatggccacgatgtaactgggtagcatgtacgatgcggcatcgtctctcgagatctctggagagagcgagctggtcacggtcaacggtcaatgacggaccggggatgcccaccaacctctcactcggtcccccgtgcttggcgcgcgcggggacgggacgtctctctcgatcgacgatactcgcagcagaccgtggaagacatacgaggagagcgtatcgctaccgagcaattcgtaacggattctcatcgttgtcatccgacataggtctcactcgaacggtcgaacgggcgagcaaggggaaaggcagggaaaagcggtgtaaaaggtcgaaatccccctcgtcccacctgctcgggattgaatccggaagcaaattaccaatcgacagatggattcaaatgatcagcggggagcgccggcgcagagctacagcgtgcaagggagggggagatctcgaaatggatgatcactttcgcctctcgtgaacactcggagccttttacccccggtccccgcgcgccaatacagggagggcggggcggagcgggggatgtcgtttcagatggtcgtttcagatggtcgtttcagatggtcgtttcgtcgaggatcggcttgaccattcctcacgttcagcacttgtcgcttgctactcgaggtcgaggtggaatcaaactccgcgccgttgtcgtaatcatagaccttgtccgaatcaaccaggccgggtggatgcatgttcgaacctatgtctcgatttatcttgtactggtacttcctgattgtgactctttggaatgtaaagcgagtcacgagtcggtaggccacacgctctcgccctattcatcgccgggaccgcggagtacgtgtcaaacaagggcgagcggacggcttttcaacctttttgagaggaggagtggaaagaggtagtaaggaccaccgaaggattaccatctccaggccaagcctgcatgtacttgcgtgacaccgcgctttcgaggttctcacgatgctggtgtgcaggcccgtacgtctggtatgctcttgcaccgggcgtaggtggagggccgaacagctatagactctccggggcgagggtcgcaggtgtagacggtcccgcggtaggcagcgccgtggcttctgcagcagcatgagtgggttcctgcaccgctctcgacgggttgaggatggcggcgagcgacatgggcttttcttgttgagagggaccggggccggcttcagctgaaacagtgacgtccgtgtcggcgaggggtcgaggcaaaggttccgtcaagacggactcgagcgcagtcggagggacattgttcttcttagggtcggtcgcactctcaaaagtcctcgccatcgccatgcacccacatcaggcgggctagagcaggagacttctttggatctcatggatcctgcttagaaaagttggacatgatcagcggttcgcctttctcagggcttgattttacgcctgcggtgcttgtcggactcccgggacccaggtctggcacggcgagacccgtgaagtaccgagtaccgtaggcgctgctaggggctcgtcgaaagcggtcatggcactgacaacatccagccttgtctcgacttgatgatcgtgtgtgtttggtgcatcgtttgtcccgttttttcttttcttttttgcaatagcgcctgaacttgaacatcgagggccacgtcgtgaaggagagacaacggtcatatgccttacgtacagccctgaacgttcaggttcccggggacgaggggcgtatcggtcttgtcttgcaggtcatcaatatcaaggccgatcatgccgttcaggatctgtacattcggatcgcatacatgaagccagtggcaatcgaccagggcgacggtccgggaatggaggggatacgcgatcgacgaagcgcaccgtaagaaggcaaagccctcatcatccagtggtccctttgcttgcttcgtgtatggcataggggaggatttgagtcgctggaatgatgtcaagatggtagagtcggccgcggtgcgggccgatatgtttgcctggtccagttgcacgcaccccttccaaaggtcgagatatcaaaggttgagaacagtacacgttgggatgacggtacccatacagctcgttgtggttcaggggtgggatcgtgaaaaatggttgatcgggttttcccatcgttctggaaccaactatacgaccacaccagtccgacccattcagtgccatgactactttcaagcgtagctcgcgagaatagtcagagaacagggtagacaagcgcagtacggaaattcggacctggccctcgagcctgtgtcgtctctttgaacaggggtatcaggaaaggcgcgatactaactgacagcatcgacacatcatcgtatttcgtatgcttacaaggaccgagactataccgcggcgacgagaccaaccgcgccccggtacaacgatcaacatcgaatgacacgggtagcgtcgcccttgagcgcctagccatcaagctcataggggccattccgagacctcatcggtccacgtcgaggtggatcatgtctagtgggatgtgaccgatgtaatgtagactgtacgtcccgttagggtttcaagcaaaaggtgatcagctccgttacctcaccctttagtcgacgcccggggaacgctccgaaactcactctccgaaccctccgacgtagtacacatcctccaccgtcagcctcgcccagaaactcgagtgcgctccgggagtgttcggtaaccatctccgtgcgtccgggtggtaggacgtataacactgttgcatggcatcgagctgatcaggcggggaggtggaattggatgggtgcgggtagtcgatcgggtgcattcgctggaggtgtacatcgtcatccaagggggtcgggcgggaagatcatgcgtgcggatcagcgcaggaagacttttgttgtgatgtcaattgagtggccccggaactcacccctatcaatgtcacccgggcgtaatccatccgactcctccctccctccttgccacttttgccaccgtgtcccgtgcccctaccatcccgatctaaaggtagctgttgttcctgtacgaggtaactcgtccgtccttccgggtctgcgaggatgttgtgtgttgactgagagatgggtaggagcaggaaggaaaggtccgggaaggtgtggcagggggcgtctgatggtccgcaagtgcttgatcagtgggacgaaaagaaagtgttgttgggagacggtgatagagaagtagctcacgatactaggaccaaagacgaatgaggtggggggttcagcgactgatctctgcacctcgaaatcccgctatgaaactcacctcattggccacaaaaggatgttctacaccaccgaacccagaaggcaaacagccgaaaccgaggagaggacgtccattagctctcatcatacccggcagggaggctaggcgcttcggtagctagacttgccagctcgatcgctcgtaggtgggtaaacgctagcgatgctgcccatcgtcatgttccgcaacaagaatcctacgtgatcggctgttccacgagatttggacaaatcagccccagtcactcctggataggattacttcccggttgaggtgatggggggcaggatatggtatgtgctcaccggcttgtctgatggtctgacgatggacgagcgggtattgttgcgggttgtcagtcggtgtggctcggacgagaccgatggtcagggataacgaccagactgcggtcgagaacttcatgatgacggcgtttgctgtgtgtatatgtgttagagaggcaacagtaggatatcaagggatacaaggtcgaggttactgctctacatctacgaacgacatgacgattcgtccatcaaacgacctcggggatcgatcgatggaaacgcctctctagcgattgaaagaggatcggaagcgaatctacctccgtatacatccgatcggatcctttttatacttccgatctctatcttgcgacgcgtgagaaagcttgaaatctcgcttcctcttcgccacacaaccaccacctcaccccacctcacctcgctctctcgcgatcggtcgatgtcccaacagccaacctcgaacaaaaacacctcgtcgtcgtggtataacccttatcacacttgctcagtcgaaccaccttgacctctcaagtcagttcctcttccacgaggtcctaattcaaaacatagactcgatcactcacgatgtcgttcccacccggattcggcccaccaccggggttcgacgccgccgccggaccatcgagcacggtcgactaccccgtctcaccccccgagatcacctcgctctcgcctcaggagattgagaaaaaggccaggaaatggcgtcagtcccaggtcaagcgtttcgacgagaagcgtcgtcagggaggcggaggcggtgtcgacgggggcaaggccgatctgccacccgagcacatcagaaagattatgaaggatcacggagatatgagtagccgaaaattcaggacggacaagcgtgtgcatttgggagcgctcaagtacgtgcctcatgccgtgatgaagttgttggagaacattccatgcccatgggagcaggtccgggaggtgcccgtactgtaccacatttcgggtgccattacgtttgtcaaccaggtgccccgtgtcgtcgagcccatctaccacgcccagtgggcatcgatgtggttggccatgaggcgagagaagcgtgatcgtcgtcatttcaaacggatgaggtttccgccgttcgacgacgaggagcctgtcaccgactatgccgacaacatcctcgacgtcgacccgcttgaatcgatccagctcgagctcgaccccgaagaggacgccgcgatcgaggaatggttttacgatcctaaaccgttgatcgacaccaagcacgtcaatgggagctcgtacaagacgttcaggctggatctcgaccagatggccaacctgtaccgaatcggacgacagctcttgagtgattactctgacaagaacgcgttctacctgtttgaccgcaaggcgttcttcaccgccaaggcgctcaacattgctcttcccggtggacccaagtttgagccgttgtaccgtgacatggacgcctatgacgaggactggaacgagttcaacgatatcaacaaggtcatcatccgaggcatgatccgatccgagtacaagatcgctttccctcacctgtacaactcgttgccccggagcgtccacttgggagtctaccacgagcccaaaaacgtctacatcaagacggacgaccctgacctccccgcgttctactttgacccgctcatcaaccccatctcccagcgacaggtcatctcggctcactcgcagttggtcgctcacgaagacgctgtgttcgggttcggcaaggacggggacgatgatgacgagttcgagctccccgaagagctcgaaccgttctttgccgaggaagagctggaaaacgacaagacggccgacgcgctcgccttgttctgggctccttacccttacgacaagcgttcgggaaggacccgacgcgcacaggatattcccctcatcaagaacttttaccaggaacattgccctcccaaccagcccgtcaagatcagggtgtcttaccagaaactcttgaaggtttacgttctcaacacgctcaagcaaaagccacccaaggcgatgggcaagcgaaacttgttcaggagcttgaagaacaccaagttcttccagacaactcaattggattgggtcgaggcgggtctgcaggtctgcaggcagggtttcaacatgctcaacctgttgatccaccgaaaggtcagtctgggctcttcggccggctcgttcgatttggtatcgctgacgcgctctcctttcaccgcgtgcgcagaacttgaactacttgcatttggattacaacatgaacttgaaacccatcaagacgctgactaccaaggagaggaaaaagtctcgattcggaaacgcgttccatctgatccgagagatcttgcgtttgaccaagctcatcgtcgacgcgcacgtccagttccgtctgggcaacgtcgacgcgttccaactcgccgacggtcttcagtacatgttctcgcacgtcggacagttgacgggaatgtaccgatacaagtacaagttgatgaagcaggtcaggatgtgcaaggatttgaaacacttgatctacgcaaggttcaacacgggtcccgtcggaaagggtcccggtgtcggattctgggcgcccggttggagggtctggttgttcttcatgcgaggtatcgtacccttgctcgagcgttggttgaacaacttgttggccaggcagttcgagggacgaaactcgaagggaatcgccaagacggtcaccaagcaacgggtcgagtcgcactttgatctcgaattgcgtgccgccgtcatgagcgatatcctcgacatgatgcccgagtcgatccgacagaacaaggccaagacgatcatgcagcacttgtccgaagcttggcgatgctggaaggccaacatcccctggaaggttcccggcatgcccgccgccgtcgaaaacatcttgctccgatacgtcaagagcaaggctgattggtggacttcggtcgcgcactacaaccgagagcgtatcaggcgaggcgctaccgtcgacaaggccgtcgtcaggaaaaacttgggacgattgacgaggttgtacctcaaggccgagcaggagaggcagaacggatacttgaaagacggtccttacatctcgtccgaagaggccgtggccatcttcagtggtactacccattggttggagagccgaaagttctcgcctattcccttccctcctctttcgtacaagcacgacaccaaactcttggtcttggctttggagaagctcaagggtgcctactcggtgcagggacgtctcaaccagagtcagcgagaggaattggccttgatcgaacaggcttacgaccacccggccgaggccctgtctcgaatcaagcgattgctcttgacgcaacgtgccttcaaggagactggtatcgaattctttgacacctacgacaagctcatcccgtgttacgacattgagcccgtcgaaaagatcaccgatgcctacctcgagtcgttcctctggtacgaggctgacaagcgtcacttgttcccggcttgggtcaagcctggtgattcggaacccccaccattgctcgtctacaaatggtgtcagggaatcaacaacttgaccgacgtctgggagaccaacgagggcgagtgtgtcgtcatgatggaaacggtcctagctaaggtttacgaaaagatcgatttgacccttctcaaccgtctcttgcgattgatcatggatcacaacttggccgattacatcaccgccaagaataacacgaccctgacctacaaggacatgtcgcacgtcaatgcgtacggtctcattcgaggtctgcagttttcgtcgttcgtgttccagtactacggtctcgtgttggacctgttgatcctcggtctgaagcgtgccagcgagatggccggtcctcctcagcttccgaacggattcttgcagttccgagactccgagaccgaagtcggccacccgatcaggctgtactcgcgttacgtcgataggattcacatcctcttccgcttcactgcggacgaggctcgtgacttgatccagcgatacctgacggtccagcccgatcccaacaaccagaacatcatcggctacaacaacaagcgatgctggcctcgggattgccgcatgaggctgatcaagcacgatgtcaacctcggtcgagccgtgttctggaacgtcaagaactcgctgcctcgttcgctcaccacaatcgagtgggacgaatcgttcgtttcggtctactcgcgagagaacccgcagttgctgttcagcatgtgcaactttgagattcgtatcctgcccaagatcagggagggcgataactttgtgctcaaggatgccacctggaacttgaccaacgaagccaccaaggaacgtaccgccaaggcgttcctccgtgtgtccgagtacggtctccagagcttccagaaccgtatccgacaggtcttgatgagttccggagcggccacctatgccaaggttgccaacaagtggaactcgactattatcgcgctcgtcacctactatcgagagagtatcatcggaacgcccgagctcttggacatgctcgtcaaggccgagaacaagattcagacccgaatcaagatcggtttgaactcgaagatgccgagtcgtttcccgccggtgctcttttactcgcccaaggaattgggaggtctcggtcagctttcgatgggtttcgtcttgatccctcagtccgatctgcgatggtccaagcagacggccgacggtggcaccagtcacttccgagcaggtctcacccacgaggccggaaacctgatcccgaacttgttcaggtacattgttccctgggagtccgagttccaggacagtagccgagtctgggccgaatacgccatgatgcgaaaggaggcgcaggcgcaaaacaggcgattgaccctcgaagatttggaaaacagttgggaccgaggtcttcctcgaatcagcaccttgttccagaaggataggcagacgttggcttaccaaaagggttggagaacttcgttgctgttccagcagtacactcaggcccgtcacgatcctttccactggacctcgcagcgtcacgatggaaagctctggaacctcaacaactaccgtgttgacgtaatcgcttcccttggaggagtcgagggtatcttggagcacagtttattcaaagccacagtaagaatcgcatgacaattcgtacgaatgatggctgacttttcctcgttgttgacgcgacttggtctcgtaggctcattccacctgggaagggtgagtgctgactagtttcgcagtcttattcgatgtctagttgagactaactgcgtgcgatatctacttccgtactacaacctacttctttccttgctgcgcatacccaaaatcctgccctccatgcatgaacgtcactaaatctacaccacgcatccatacgacgtctctttccttttggatacaaacagtctattctgggagaaggcatctggtttcgaagaatcgatgaagtcaaagcgattgaccaacgcccagcgaggtggtctttcccaaattccgaatcgacgtttcactctgtggtggtctcctacccttaacagagctaacgtctacgttgtaagtgatcgcaaccaattccgagatcgttcgcgacgcatttctggtccaaggctgatcatcgcgccctgtcctccatttcctgcaaccgacactttgctttgatcgatccagggtttccaagtaagtggttgaacgcatgctaaatcctttatttcgatactcatccgctcgatttcgaatcacccttaggtacaactcgatttgacaggtatcttcatgcacggtcagtccccctagtcgcaatgcgatctgcaacgacaagttaggctggttactcactttcctcctgcgctctatcttttataggaaagctaccgaccctgaagatcagttacattcagttgttccgaggtgagcttgaaactctgtgtttgagttcaacaaatcccgcactgaccttcttcccctccgccagcgcatttgtggcaaaagatccacgagtccgtcgtcatggacttgtgtcaagtcttggaccaggaactcgaggctcttcagatcgagacggtgcaaaaggagttgatccatccccgaaaatcctacaagctcaactcgtcggcttcggatatcctgctgttcagcagttacaagtggaacgtctctcgaccttcgctcttgtctgatgctcgtgatcactacgacggcaccatgcaggccaacaagttctggatcgatgtccagctccgatggggagactacgattcgcacgatgtggaacgatacgctcgtgccaagttcttggactacaccagcgactcaatgtcgatctacccctcgcctacgggattgttgctcgccatcgatttgggatacaacttgcactctggtttcggaaacttcttccccggtttgaagcctttggtcacccaggccatggccaagatcatgaaggctaacccggccttgttcgtcatgcgagagcgtgtccgaaagggtttgcagctctactcgtccgaagctaccgagccgtacctgtcgtcgcagaactactcggaattgttctcgaaccaggtcatctggtttgttgacgacacaaacgtttaccgagtcaccatccaccgaacgttcgaaggaaacttgaccaccaagcctatcaacggagccatcttcattttcaaccctcgatccggacagttgttcctcaagatcattcacactagcgtctgggctggtcagaagcgtctcggtcaattggccaagtggaagactgccgaagaagtcgccgcgttgattcgatcgttgcccgtcgaagaacagccgaagcaggtcattgttacccgaaagggaatgttggaccctctcgaagttcacttgctcgatttccccaacatcgttatcaagggatccgagttgcaattgccattccaggccgccatgaagattgaaaagttcggagatctcattctccgagccactcaacctcaaatggtcctgttcaacttgtacgacgactggctcaagtcgatctcgtcttacacggcgttctcgcgtttgatcttgattctccgttcgttgcacgtcaacaacgaaaaggccaagatcatcttgcgacccgacaagagcacgatcaccgagtctcaccatgtctggcctacgctttcggacgacgagtggatgaaggtcgaagtcgccctcaaggacttgatcttgagcgactttggaaagaggaacagcgtcaatgtcgcgtcgttgacggcgagcgagatccgagatatcattttgggtatggagattgccgcgccctcgattcagcgtcagcagatggccgagctggaaaaggcgaccgaggcccaggcccaggtcactgccatccagaccaagaccacgaacatgtaggtaccaaattgcgctgcgtggcggataacctagctgacctcgaaataccatgatagccacggagacgagatccagaccgttaccaccaccaactacgagcagcagacctttagctccaagtcggactggcgagtccgagccatctcggctaccaacttgcccctgcgtgtcaaccacatctacgtcagcaacgatgatgtcaaggacgacgctggaagcttgacctacgtcatgcccaagaacgtcctgaagtcgttcatcgtcaatgccgacttgcgaacccaggtcgccgcctacctgtacggatcttcgcccgccgacaacaagcgggtcaaggagatcaaggctgtcgtttgggttcctcagaggggaagcaacaacacggtcgagttgcctaccaggttgcccgagtccgactacttgttgaaagagctcgagcctttgggttggatcaagactcaggtaagccgagtcgaacgcgatgcgacacgatcacgaacagcagactgatcgatatacttcttcatctcgcaggcccaagagttgaaccacttggcacctcaagacgtcgctgctcaggccaagatcatggccggaaacccttcgtggggacccaactcgatctgtattaccgccgcgttcacgcccggtagtatcagtctgagcgctttcgagctgagcgttgccggtttcgaatggggtaggaagatccaggatgtcatggccaacccggtggtgagtccaggcagtcgcagcttactctttaaggggccctgtgctaacaatcatatacgtccacagggattcaacgcctcgatggcacaccgagtgcaattgctgttgtccgaccgtatcctcggagccaccttggtacccgaaggtcgagcctggaactactcggtcggactgacccaacagttcgcacctaccatgccctactcgctcaccctggatgcccctctcgggttctgggcggaggagcaccgaccggctcccttcctgaactttgcgacgatggagagcggcgaggattcggccgatgtcgagaacaccctggaatagccggagtgttcgactcggaacaaaaaaacgacaacagaaacatcctatctttttcgacattccgttcttctcgtctctatgtattacctcgatcacgccttgtaacgaactcggctcctgcacaagtgggacctcatgcgatgattaatcaagtacgccgatgtgtgttgtgcggatctgtctgcacgtttcaggcttgggccacgcttgtagttcgcctgacgtccatcgagtcatccattcagggaattttccagcgcgatggctgtcgatgtgcttcatactctgttcagcacacttggtcaaagacaagcgatggcataagtaagtagacagctcggtatggaattcatgaactgtgctaattgttcctataacgcgcttcgagacaagacgactttggtagaagagcctcgacctggccgcgagatgcatcaagtcttgatactgacgatgagacggttggcgtcttcctccatcttctccctgaacggcaccaaacttcaaggtcgctaccgtgttactacccgatcatgacctatagcccccgaacgtcgatgcctccaatcaactcgtctgcattccatcgtcggacccgttcgaaccaatcatatctgtggtattgcgtgatccggtcatcttcggaagcttttcggtatcttccgatttttgtgtcggaagtaaatttctccttcaaaccctgatcttgaccaagaccgaaagagtgcccgaggcgatataagcaattagcaaactagaaacaagagagaatttacaaaccaacaatcaagtcttttcaatcgcatccctactcgctactcgactaagctatctctacgactttacactccaccatcatctcatccgaccaacccggctcaatccttatacatcaacaatgtccaaggttgctcactctcaacccggctgcggttcctcttcatgcgcctgcaaagcagcctcttcctcctcatcgaccgtcaagcttcccaaagccaacaagacgacaaaaaactctgtctggggtatcgacgcacccgtggatgagcactcttccctcgtccgttcttccggtagcaagtacggtgctactcacggtcagaacaacgagagcatcgatttcaactcgatcttgcgtccgacgcataccattgccgacaagtgtgaccgacccggtggggcgtgttgcaaggacgaggtgttggaggagaggaagcttatcgacccggacgtcgtcagggatatgtgagttcggagggcgtcttgcaccacaagggttcgtgtaagaagacgagctcgcgtgactgatcaccgctctcgacgcctttttctcactcgcagcatcatcggattgtcggacggtctgacggtgcctttcgctttgacagcaggattgagcagtctcggaagctcaaagatcgtctacatgggtggtctggccgagatcgtgagtccccgtcgtgtgatcccccgccaccaggaccccggcttaccaatccaacccaatcctcaacgcatctcgtgtcgcctcccggtcgccaactttgcccttacaggtcggaggagccttctccatgggtgtcggtggatacctcgctgccaaggccgagcaggataccttccgccaccgttactcggagattacgaaccgtctcgcgatcgcatgcgactctgagctggaccgtgaggtgcacgacattctcggtcctctcggcctgcaggaaaacgtctcccgggtcgtctcccgagctctggcccaggcgcagcgtgcagaggaggacgccgacgatcgatcgttcacttccagtttggctcaccagcggtccctgttcggtcgactcgggctgacgaaccgaccggtgcccaaaacggggacggcggcgttcctcttgaaactcggagaggggatggaggaagtgccgagcagccggttgttcatgagcgcggtgaccattggggtcagttacgctatcggagggatcttgcccattattccctactttttcatccccgtcgcctatgacgccttgaagtggtcgatcgtgagtgtgcaaagacgctcggttctactgtcatcgtatctccatgtatctaacgatgcatttgatttcctcgacgtcctgtagctcgggaccagcatcatcctcgtcatctttggagccctgaaatcgtggttcacgggggccgccctcggtcccgtcggtgtagcctggggagccatctcaacactggccgtcggtaagcactttcgtcggctgtgtttatatcatcggaactgtcttactaaatccactgtttttttttttttgctttatagtcgccgctgctgcagccattgcatgggggatcgtcaaggcattggagacgtaatcgtcccgatgactctccctttttttcctgacgaatgtagatagatgcggtcagagtgtaataataacgaccaaggcgcaaggccgactagcatgtagggtgtatcatgggatgtataatatgtttcgatccctccgactggtcttggaagaggaattgattcggctgtagccgtggcgtatttgtctaacgggtggacggtttgaacgatttaacggaaatcttttgcaggtcaggcgcagtcgcagccctcaggaggaccgaagccttgaaaagagggtatcagtccacatcttgctcgaccctttaatatcttgagtcgatcccatgctacgcttctaactacactagcacgggtgtgagatacatcgaggttgtcatatttcggatttgaccgatgtagccttcaaaattatattttgatcgtatcgtgagccatcttcggccaaccatacacgacatcgtgacacgtgcagatacaagaggccgatacgaacccgctcatagctcatcgtttctatgcaattgattcccacgcctgcgaatacttccagtctagcgacatccgggtttgaggtcccgcaggaggcctctcggaacttgcgagcaggggtccctcgccgacatgccggtcctcgatcacgatgcgacacctccagcaagctggccaactggggtgacctttctcacccggtcccgactatctcctacgttcgaacgggctcatctcccactcttgaacgaatcctcatcatactccgcaccttccaaggcactcgcagcgaaacaacctcagactcaaccgtttccgaaagacctgatcaagatcaaaaagatcaccgacccgaaacacccggcgcacgggcagctaggactggtcgctatcaagaagctggaaccgcggaccaagatcctcagttatctcggagtgtaccatacccgtccacatccggagagcgactacgacctgtccgtcgtcaggatcagggacgaatcttcccccgacccggaggctacgattgatatcgccctcgatgccgcccggtcggggaacgctggcaggttcgtcaacgattaccgtgggatcgggtcgggcccgaattgcgagtttgtcgagacggtggattcgaacgggtggatggggatggaggtgtggagcttgggcaagggagtcggaaagggagacgagctgttggtcagctatgggaaaggatggtgggcaggtcgacagggatagtcgataagtcgagccgggtcggaagtacaagctggggccgaactccggtgccgtgacttttaggaccatcttgggcacgctggcaatccacggctctggcgaggacgtactagaggcgtcgagtcttatcgatatacaacgctggtcgattggcaggaccgttccctcaactcgacccggactttcaagcctggatgaccctcctcccctcatcgtataccaactccaaaacctctcgcccgtcctcgtcccccctttcctctctccttgtcaacccttcattcccccagacctcgtacgccggcatataccgatccacaaacctcgcgacctcgtcatccgacatccccgcacctccattgatcgccttcatctgacgttcctgctgcaacctccaatcatatacatacccgtacgagcgtggtcggatgaccacgtggagcgggaaaaaggggtagatctcggtagccaccttggctaggttctcgttaatctggagcagggcggtcagggggtgttcttgcatcttgtaaggggcgggacatggtggaggagggaccgggtcgggaagatacccccggatagcctcttcagaaagtggtcggaatcccaagctccaaccttccaggataaagacgtctaatgaacctcggatctcgatggacaagggcgctcgatcgccttgacctgcaaagaggctcttgtcgaagacgggcaggttgacgatcgtctcatcgttggatccggacatggagctggaatcaatgtcagacctgcgggtggtactcggttgattgatacgggatatccggtggagagtgtcgacgagcaagggaacgtcatgcgtccccggctgacctcgaccgtgcaagagcttgttatccgggtgtcgctcggccaggtcgaccaggccgtcgtgcgtcaagtaaaaatctagacatccgtcgatcagcgagacacctccgacggcgaggtgagacaagagtcgggtgcttaccatcgagggagatgacggctacgttcaggttgtatggggatgcttgtaacagaccttgtaggcccgctgcgagcgtgcttttccctaacgataaacgatgaacgccgtatcagccccagctccgtgtctgacgggtctgcttccttccatacgacccggactgacctgctccttgaggtccctgcatggagaccatgaccggtgcccgtctatcatcctcgctgacctccctctgaggttggagcaagaggtgtcgattgtgttcgaggatgaacctggcgatgaggcgcgatttgtagctcgtcgacgaggccgtctcgtccggcaagagatcggggtcgggcaagtttttcaacatcgcggaggccgttcgtttagctcgatgatagcaggaggactcttgggtgtatgaacaggcaggtcaagacaacgttgtcatgctgggagatgacgatacgtcgatgtcggtcgttgtagtcgatagtctttcctttaccgcgcgacgccggtccgaagtgcgcaaagacctgaacaagtccggcaaatatgggaatctgattcggtctcatcggtcgttcttcataccgagtttcacagcatactagtgctctgccctagagccagtacccaagctggtgactgttgtgatacccatgatccatattctggtcgtcgatgtcgtcgttgtccaacccgattctcgagttcccccgcccgcgtcactttgactggcactggacaagctaagggaagggaaactagaaatcacaatcatcatcatctcatcgcatcgtcgtcgtcgtcgtccggatacgtaccaactgtctgcctcgatagtccccttctacctagcatccggtacgacctagtcacagtcactgcttgtggacccttgatcgcccgccatgatgaaatcgatcgggtcccagatcggtctcccctttctctcacaggacgaggacgcgaggttgcaattcaggtcgggaaagaatggtatcaaacgattagcactcagagaggtgagtgtgcggtgaatgtggtcgactccggatgaaggagtttcgaaagtactgggtgcaccagctgatgttcgatgtctcacgattgtcacactcgacggacaggccattccggtccacgatgtcgggtactggtcgcaggtgagttgaagcaaccaggacggtagatcatacacgagcatcgcctcacccacccgaaccatcttcgtaccgaaagtactggatgctctttgagagctccgcagacgtacattccctgatatctaccggagatggtgagttgtccggaacccaaaactccctaaacctgcctgcctggctgcctgcctgaccgtaccctatcccatcgcgcctagtccgagccgcccttcatcaatgtcctcgtaacatatccaccctgatcaccaccctctcccatcatctcttctccatggtcccctcggcttccttccctacggctccttcctccagctcgatccccctccctacgaacctccgacgaaccctgaccaacgcccgtggggggtccaacctctcctcccctaaccctactcgggaggtcctcaactgtctacgggtgctcggaagggtcttgcctatcgtttacgaggcagagacggataacgccaaggatcaggattatagggatgtcgatggtgatcccgtgtacggacagggccaggacgacgacgacgacgacggggagggggaagaacgggtcgacgatcgaaggttgaaggaacatttcgcttggcacgtcttgtggaaacgacctctggcgccttgtcgtcccgattcaggtccaggttcagacgatcaagtcggacgggaaggagggtcggcagcgggtgaaagcagggacgtttccatgagtggaggaggatcaggggaccccttgacccgagcggcggatgaagcggagaggaatcaacgctcggcaggggcttcgagagagggagaggaagaggacgaggtggccagattaccgagcttgacggacaagctgttcggggtgacggtagacttgttgttctgcgctgggtttaccataccggagagcatgaagggacccgatggcaagggagacaagatcaacgtgagtcctccgtggatcctctcgacgtgactcgcagaacccggattgaccctgctcgtcggtccagtacgtgatttgggaaaagggagtcgggagtacccacgatatcggctcgacggcagaattcgatcgaaacaagatcgaagtcttgcgtttcctcctcgtccttctctcctcgactatctacacggcccctcacagccttccccattcgctcaaccgcccgctacaattcctcactcacaacctcgaacgtcgactcgtgctcagcttgttgtgttcttggttgaacacaagcctctcccgggggtcgcagacggcatggggggagaacatcccttacaaccatttgatcacccgagctggcgatgaccgaaggacgctggtcaggatgagcttgatggtcctgctcgtggctctcgaccattggaaagtcgatcgtgaggaaaccgtcgagacgcccgggttcggaggcaacgggttcgctatcggcttacccttgcccagcccggctggcgggcagggcaattcgatggtcggggagacggtaccgaaaaaagacgaaaacgcattcaggtactttgtgtccaaactagtaagttcctggattgtgaacatgcgaccagcctcactcgcttaatgcatcttgtcgagtgcctttttagcaccgcacagaagactttgaattcatcctcaacggcgtcttggcgattctcgccgaacataccgccgtcaaccagaacgtcttgcccggtagcaagaaaccgatcgactacatcttggagatctgtgcgttcaggtcgggctaacgatggaggggcctatcgctgaattgcaaatttgactctcttcccagtcatgctcttttggaaattgatggatctgaacaaggtgagtcgatccgtcattacgtatttactgtcaaccgaaaccgatgagctggacctctcccccttcagcgcttccgagcctatgttcatgaatctggaaagagcaacgatattgtcggttacatcctcttgacttgcttggagatgaaggacaatccaggtaagacattcttgccttccggagctgtccgagcccggaaaggagctgatcctggtatgtatactaccagcacaccacggcttgctccgcatgttgtcgtacatcttgcaggcgatgtccgccgatcgagaatttggcacggcgttgaacaagccgttgacgataaccgtgccggtcaagtggaacgtgcaagggtccaccgccgattttatggttgtcgtgagtcttgcatgtcgtaaccctcgtggtgttccgagcgactgactgggtcaacacgcgctagtccatgtactcgatcgccacaactcccggtctcaatcctctctttccggccttgacagtgacgatcagcaatgtggctccttacctcaagggtcttggcgttcaggcgtcgacacggttgttgcaattgttcaaggcgttctcggcgcccaactttttgttggcagatgaaggtcaccctcggctcgtttattatctgtaagtgccaaggttccggctcgcccgactcgaaagtactaaagatcgagtgtattacagtctcgaaacgttcaatggcatcatcttcaatcagttacagggtatgtgattagtgcagcccgcacgacatgtcaggacagtgctcttcgaactgacactttcgctctcagaaaaccccaacattgtctacgctatcttgcgttcccatcaagacttccagaacctggcgactttcacccttctcggcggtctacgcgacatccagaagcgcatgctggccagggctgcgaatcgtgagctgatctggacgtgtccccgtgacggctcggatctgaccgccacgtcccgcacgcagaagctgcgatcgaccgcaagacagacgagactcgggcatctcaagattcaaacgtacctcaagagaaagccggacttttgagtgaggagcatcgacgcgacaccatggatattggtagtcccaatctcggaactttggccccagcaagaagtcatagtgtaacctccccccttttcacgccaggagaagcagaagaggatccgatggcaacggcagagtccaatgcgagcaaacagacggctaaccccaaatcggaaaaagccaagggcaagatgagagagcggagcgagtcgacaagcacactggctttcgagaccgagctgcatcgcctcgccatgagcggaattggtcccaatggatacgtcccgacccaagaatgggtgtctagttggcaaaaggggtacgacgtggttgccttcaattttgacatacagctgaggctgaccgaacgttccttctctcgcagccttcccctggatcccgtcttgctcacaatttccgagcttctgcccaaagtacaagaattgcaaccatcgacaacaccgggtcccagtcggaacgttattagctttttgaaaagcgccacactggtcgacgtgctcccatcgcatcccgcacataaccctcgaaggtttcaagtaagcgcctggatccctcccgtgcgaagcgggtctttctgataagtatattgcctcgctgtcatcagtggagcgtggcctccacgatctggctcagctccctgctatggggtcagatctatacggctgctctgcaaaactttaacaacactgccgttcgtcttttcggagtcaaacaggcggcgccaacccgccgcgaacaggtaggcactgctttgacaggcgatagcggagacgtgctgacagagctgaacgtcgatctcatccctgcaggccattcaaaacgtctcgaacaggttaatgtcgtttgtcaatggatatcctgctcctatggtgacgggcattcctaacggacgaccgtcaatgtcagggatgtagcatcaacaacttgtataggctagatccatggtgtttgctttttcccgatagatcctgtaactatatacatgcttgtagacgtctcaaattcgagtgcttgagctcgggcattttacagctcctgcttgacccgatcggtggcctggccggcggcgaccttgacggaagcagtggcgtgtcgaacggcatcttctacgtcctctaaggaagcgtcgctgagcacgtcggcagcctcgtcaaactttcggtggacaaaggccgagaggatgttgttcttcctctggagctcgtcgagcttttcgggagcaagcgagggggattgcaagagtttgccaatcctgcgtgtcaaatgacggattcgcgagcgaccgggtcaatcaccgatccaatccgaactaaaggcaatgacggcgggacaaacctggtagtctccttactcaaccaatcttcacccttttcgacgaccctctgcatagccttgacgtagtagtcaccctcgacgtttccacgcttgacgaggtccttggcgctagcctcggcggatccggtcaacttggcaatgtacgcctgagccttttcgaggatgctcgatcggtccgagctggaagcggcgctgaagaactgcgaggcgagcttgtcgagtgccaagatcttgcctgcagtgggcaagagtcgacctccaacggctcggtgagtaccgcattgttcgttcaagaactatatcggtcccgtcagcggttgctgttgacaatgccacccgacacccaaactgacctcgacgaaagcctcttcggacctagccttggaataggtgacggggtcggaaccgtccttggggaagaacttgatggtagggaacccagagataccgacttcggaagcgatggccttgttctcatcggcgtcggcgttcatctgagcgacgacgcactgcatagtttggtatcaagatcggatattagctgtccgtcgcggatagtccgagcttttacgtgggcaaatactcacgttcttctcgttcttgaaagcagtagcgaccttttcgtaaataggcttcaagctcttacagtgtccacactattcatccgagagacagaccgtcaatcatcaataccatgcgttgctaatttcaccacttttgcggaaaggtgaatgggggtaagactgacccagggtgcggtaaaggcgatcaagacatccttgccgctgttgatcaactggtgatagttcttgttgtccacctcgagggcagcgggaggcgcaggaggtttgatgctagacttgacgcccgacttttcggtgacactgtgtataggtagatcgggttcgtttagacgtgttctcatttggttagtttaggacatgagaggagaggcgtggggagagagaagaggaaggagggactgacaatttggccaaagagtcgagatccctgcctccttcgtaatcaaccggttcacctccctcggggccaaaccacttcaaagctgataccgacgaggaaaccccaattggacgagaggaagtgatcagctcgggttccggcctcctgagacgtcgatcgacgatgtggactcactggggtaacccttgacgccgaacctctttccgagggatttcccggcaccgtcggcgtccgtcttggcgatgatgactttgcccgtagggaaggcatcagcgagttgttcatacacaggggcgaggttcctgagcgtggttatgaatgtggggcacaaagggagttcgggatgttagtacggcgagatgcttgctaatcaaggtcgttcgatctggacttgcttgcagtgtccacactatgcgaatcaacgccatgttcggtcagctcatgccatttccggtatgatccacgggaacctcgatatgctactcacccaaggtgcgaagaattctacgagggcgggttttccagctccgacgagtttgtcaaagttgttaccgtcgaggtcgacgaccttgctcgcggtgaccgagagggcgagggtgacgagcggtaggaggattgaagggagacgcattatgggcggcaaagaaagatcagaggtttttgatctgacctagatcgaggctagatgacgggattgccggtgaggtggacgaatgaccatttcttgagggtgtgaggtgagctacgtggaatgttgagagggtccctgttcgatctctgagcctgacatttctcaaacatttccgattcgaaatttcccgacgccgcgtcatcacgattgtcatcgtctggtgctggtaaaggcagcagctaacaggcaggattgatttcgcaaatgtaaaagcactcaaacagaagatgttagacgtatcatcccaatctcttccacactcttgcctgggcaaagtcttttttcataccgtatcttccctctgatcgctgcgagcgggtcaagcgcaatcatctaatacacatggatacgatcccacgaccagaccagctggccagccagcctccccgacctttttcataggaaataactcaagggctggggactcggtatagcgttccgaatgttgacgctatttgtatcacggcgcaaccgatcaagtgtgttcctcgttccaacctgagactaggcgggcatccttgtcagattacccgaggtacccccgtcccgttctcgctgtggtcatgttgttagcttccttcgcttcgaatcccagtatgtggaaatcggtagaggtatggcatctcaccaattccctagttttgaaacaagcagcacacgtgaaatcacggcggtacgtggtcggtaaaggctcgaggcgacacatacgcgctctaccttcgcatgtacgaatgctagcgttattcatgatactgaccgcggttcatcatattgaagatgacgcggatcaacacaataagataagattttaacggtgaagagggtgatgaagatgtcccctgttcgctacgcagcatgaatggcaccaccagtattggtccattcgccgcacttctcacagcctcatttccgctcaacatgtacccgcaaaatttccttgatctcgcgaccggcagtcggagatttgaggctcgggtccgtggaagaggattgtgtatgtcgagtcaaaccgcatcctctacccgcattgttattgcggtctttggggtggattagcgatctcgatgtgaaacgcccagaggggaggggcgccaggacggatctcggcattccctggagtggcggcgtattctagccgatcggaagaaacgaccgggccggaagcgagtcgaaggacaatagaggagggtgaacaactagatcaaaggcaaggtcgcgatcgagggatggaggaaacacgaaagaccatttcagcaaggtaaagaggactggtcgcctcttgttccatcgctatcatatacacggacgtcacccattgaagtggtcgtccaggttgcaggaagcgcttcccatcgtccatccaacgtcgaatccctaactgctggctgtgtttaccatttaatctattttctagaaatagccgcaaccacgcgttcgattgtggcgttcaatcgttccgggctgtgtgaacgggacatcctctatcctcttcgtagctcgtagtcatcaaaataaataaaaatcaaagcatcacctggattcaagaaatacgaaccgactctcatcacgtcgacccgatcacaaatcttcaactccctaccgttccaagcaagcaacaaccaacaatccgctgagcaacccacgtcaccctcaccatgtcctacctcattcctctcctggccacctcattcttcctcgccggacctcgtcccgcgctcggagcttcttattccctgatcgagagccataccggtagttccttctttgatgggtggatctacgagaccgggtacgataataccagtgagtacagtctcgtctcggcttcgacatcacatcgtggcctgtatcccgcaaccgaagtcgaagcaggggagctattacggtgtccctcgacccggatgagaaagctgatggaccgtggatgttgatcacagctaatggggatacgacatggagttcctcttcatccctcgcctatgtcaactcggccaaccaagccatcatcaaagtggacaacagtaagtacccaccacgttccccctcttcccggcctggccgtgtcttcctcctttctccagtcgaccgccgcgctgacaccgtgatcatcacctcgtgttcgtagcctcgacggtcccctataacgaaaagcgagattccgtcaagctgctttcgcagaactggtataaaccgggtaccgtcttcatcatggacgctgtacagtgagtcatagtccatatccccattcgtttcctgctacttcggcctggttccgggaacccgacccgtgatcaaggatgcccatactgatcacctttttgttgtcatgttctgttgttgttgttgcctttgtcgcgtctttgttttgtttgtcgacgttcgtcatacatcagcgtacccgtcggatgtagcgtctggcccggtgagtcacatgacttttcagattcgacctcttggaccattcctgttcggtgtaactgatctggtttgatgtgcttcgttgtatcgcgtgcgaatagcatggtggacgcgtggtccgaactggccggctggtggaggtgagtctcgattgagatcgaaccttcagaaagaccttactgattgatagcacaaaatcgaaatcgaaatcgaaatcgaaatcgtggcggtgatcagagatcgacattttcgagcctgtcaatttgcagactaccaaccagttcgccctgcataccactgacgggtcagtaaagaaccctcgtcgatcgagctgatggggccgagctgatccggtggtgcctgtctgcaggtgcacggccacgtctgatgcgtcgctcagcgcgacggggacgaccggttcgacggattgtaaccaagaagtcaattatggatcgggctgcacggtcacgggcggagatgccgggacggcgttcaaccagaacggtggtggtgtctatatcatggctttcgaagtgagtcgggggcgattctcggtgctgtacatattgaactgcggggctcatctcgtgggcgatacatcggtacaagaccaccgggatcacgatttggtaccaccgacgagccgatattcccactgcgctcagctcgacggctggcagcatcgacacctcggccctcggtacccccgtcgcttcatactcttccagctcgtgtgatatcagcaagtttttcgggagccagcagatgacgctagatatcaccatgtgtggagactatgccgggaccgcgagcgtgctcgaggcgacgtgtggagcgttggctacgaatcagacgtgttacagtaagtggagagcgatcgtgtcgtgattgcgggattcgcagctgacaagtcggacttccaccagccacctacgtcctcaactcgaccgtttacaacgaagcctacgtaagtcgctccggatactcctcgatcgtctcgccgagtcacaagcactgacgtggcaatggcattccgaacttacagttccagatcaactaccttaacatctacggaggagacggctcgatcgataccgagctcagcggcaccaccacgaccgggtcttcgacgtcgggcgcgggcactgccacctcgacggccagggtcaccgggaccacaactgcagggacgaacagcaatctgaccaacgctgccgtcggagatgttgccggagtcaagaacattgtcggcgggttcatcgccttggttggagtgacggccggtgctgtcgtactcttcctctagacatcgccatatgtggcctgtgttagacggcgacctgctttgagatacatgaatatatattatacccagcctgacacgattcgcatcgtcgtacaacatggctcagacctcgggatgtgatcatgcctcgacatccagcgcctttaacaatctcgttgccctgtccttgatcgctacctgctcctccgaatcgacttcgggctcctttgcctcgtcggtcgtcttttccgtcgtctccgccggcgtggttttggcaggggtctcctcggcatcgtctgccttgatctccgcctcaggttgtgcctcggaagtcacctcgggttcatccttcttgggggtctccaatcgtttcttggcgtcctcgatcatgttctacgaaaacgagaaggcagccgttaagaccgccccggcaaaatccgcggggagactcgactcacctttttgcccaccccttggatggtcttcaggtagttgatagtcaggtcgacccatcgttccgggatctatcacaaggaattgacatcagtgtcaacgtcgatgtcgagggcaagcgtgtatgacggggagacccacattttcggtcgaccagatgttacgcaagagccaattctgcctggccttgttgaacttccatacgactgtaggatccgccttgttctccttgaagatatgggcatattgtagggctaatcaagattggcgacagaacagaagggtttgtcactaatcgatacccatatcccggatttccagcggaggggcatcatcatcccggcacgccaactcacctttctgcgactgttcgttgatcgacttgtccttgcccggctcggtgacctcttcctgttccgcctcttcctcctgcttcttcttctcttgctcctcttcagtgatttctgccgggaccttggcctgcgcggcggcggatttcgcctttttcgactttttctcctttttaggcgctggcgttgaagccgaggtctcctgtgcgcccgtcgccagttgagcgggggtcatttctacgtccttggagtctgctgtcggggcctctgtgggccggatcgaactctcgtcggtagcttcagtaagtttggttttagcgttcttcttcttgtcctttttctgcttctttgaagaggatggcgaatcctctgccggggttaccggctggatgggctccttagacatgtctgctctagccgtagaagcgggttcgatctcggcctttctcttcttggacttcttctccactggcaccgactcttcggtcccttctaccttctccgccttggcctgtaatggcccaagaggaaacgtatcagcaatcatatcagttcactcagaaggattgaagacgatcatcagcctgctcacctgcttcttggcggccttcctcgccttgcgctcctccttggtctcggtcttttcgacagcttggttctcagacatctttcgaacgttatctatagtcgtaatgggtgtgaagattgcatgcgagagagcctgtatcgtcgccgtagtcggtatttcttagacctctcgcaatgtggttgactgaaattcgaccaaccccggtcgcgagaatccaaagtggaggtcaagtgagattcggtcggaagctaatttcaaaagatgtcaaatatgccgtaaaagctcgatgaagtcgttgatagcgcataccaagttgtcttacaaagttctcacaactcaccttgtaaaatccccatgaagtgtctcaagcacctcctctgacaaggtaggacgtggtaacatgcacctgtcaacggtgctgatctgtgcctttcccagacttgttgtgcttctatggcaggcaatcagaggtgtctcaatggccaaccagatgcccgtgagcacgtgaccgaagtcaaaagttaccaggcatgttgatgcgactcaatcatgaattattcgcctaccgattagctttcaaccaattgacaggggatgtcgacttagttgaagagtggcttgtatccctaatcggggtcatcagcctgaccgtcgacagcgcctttgcgagtcgatggaggctagattgaagctcaccccattgcaaggccagaaacccggcagatgacgctcagctcctcttcaatacacaacgaacggatgagcctcaacctcgctagtactgcagatgagatatgtcagaagatccaagacatcatgaagcctcgcaatactgtccagactggctgaggaagacgacgacgaatatgccaattagaagcgcgcgcttgttatccccttaacttatctgataagatggactcgcggctcgatgacctggaaccgagcgacaaacaagctttcaacccgaaatcatacccccatgcatcatccccgaggcacctccgtcaccaacgacttgcaaatcaccgcttattacggtccgatctagacatggaatacacagtcaaggcaagctcctgacaatcagatcatcacaaacagtggacttggtggacaacagctacgactacccataacgcgtgacctggacatgccaaccccgatccaccgtgacgatccggatcacccaacgttaacaatatgaaacccgccatgatccttttcgctgccgtatttctcacctttgtcagtctagtacaggctaaagcaccgacgaaacagagtgtcgtcaccatcggctatcaaccctcaacatgctctgacggttgcagggacgccctccgcctcgtcacgttcaccgacatctcgcccgcccaggggttctacgccggacagtgttcttcctggctcctcgtctcctccctagctgcctgtagtcaagcgtactgtacccgacaagaagcgcacgatgggtgggaagcgttcgaaactatctgtcagcagtacggtggggtggacttgttaccgtacgaccgggcgatcgccctcatccctgcgaatatcgtcgaggtgaataccttgcttcaagggcagggagtgtggaacgagccgatattggttagccgggaagcgtttaccgcgggtctgcgcacagaggtgaatcggccgagtgaagaaggcaagggtggataggagtagtgctgattcgttaggaattgggtctgccgatttagcgtgcctggcaacgacagaatacgttgcatcacggtgagcatcagtcatcaagcagaaaccctcagtagatctaaaggtggtttcgttacattacatcctacctctacagcattcgggtaagtcctccaacccatcctacaacttggtcccgaaagcttgggctgattcccttacggtcctctctgcagctggtgcatgtacatattcctagccctgctcgtcctcctaggaacgctcaaccgaatcctcgccttctacatccgtcgtcaacccctacaccggatcctggcatcctctccctcccttttcacccggctgaacacatacatcgtcaagtacattacaacccctatgctgtggcggtacagaaatacgtccacgtggggttggatcaggctgcccaacagacttcaagggtttttggtcatgctctacgtcgggttgaacgtcctcttcgtgtttgtcgggtatacgacgtttgacgataatctgtattggaggaacgatcggagcgtgagtacgggcgttcgacgatggtctctctggaatgttgtgtggctaattccttaatgtggtacttcaggctcaactgtgtcgatacgtggcggatcggacaggtaagtgactctgatgatccagatggccgcgtagaaacgactgttgatctcgctcggaactccgcgctcgatcaggtatcatggccatctggaacctcccacttctttgggtcacggcgacccgaaacgatatcttgctctatatttgtggctggtcgttcgccgacctgaatctcttccatcgatgggttggaagggtggccatggcgctggccgtcgttcattcgctgtgagtcagacgtaaaaggagacatctcctaaagcgtagtccgatggtgtctaacggacaagacatcgggtacagagcgtacatctggatagcccggagtcatctggccaggaactttgccaaagaatattggtactgcggcttgatcgtgaggcttgacttggacctcgattcacgacgcttgacatgattgacttattcgccgacccatacacgcataggcaacggtatcgatggtcctgcttatcccattatcgatcaaatcgctccggatggcagcatacgaatttttcttgatcacgcatatcgctctggccctcgtctgtttggtgaccatgttttagtgagtcgcttgaaaagatttcatcgtccgatcgaatgactgataatgtagtctcaacgacagtcacgtacgcattttcaacgggtcttacgacccctggctttgggcttgcgtggggatctgggcggccgagcggttactccggctagtccggttggtactcttcagctggaaggggatggattggcgtactttcaatgccatcatcacggcgggggacattgaagatgatcacttgcttcgactcatcgtctccacttccctcacctatacacccaaaccagggacgtactatttcctctactttcccactacatggtccccttgggaaaatcatccgttcaccctatcagggtggactcgtcgcccggacgggcaaaccgaccttcactttctagtcaaggagcaaaaaggcgctacgaggagactggcaaggcgtacgaggaaggccggcaatcgtctcgaatgccagatctgggtggaaggaccgtacggaagatccgctccgctcgacgagtacagacatattctcatggtcagttatcgcaaacatactgcagccatgattcataatctgacatgttatgcgatgctgctgatcaggtggttggaggtagcggcattgcgacggctcttccatatctgcaaaaactccgagaatcgtctgatctggggccgaagtccatggctgcgcccagcttcgtacgattggtctggattgtcagatcacgcgcatatgcgaaacacatcgtcgagaacgacttgcagagacaactaccgcatgggatctcgcttaaggtggacatctgtgtcacctcatcagaggacggggcggatgcgcccttgctagcgatggcccataccgaccatgagacggaagaaagcgaatctgaggaagacagcatccacaaggaaaggctgcgtcagaccggaatcgttaaccctgccggcgttactatacggtaccgatcgggaaggcccagtatgagcgaggtgctcgaaatgagtctcgacgatctttcagtcgcaggcggtagactcgctgtgcagacgtgtggaccggcagccatgatgaaagatctacgagatgcactcgtgcccaagtatggaacagggaaacatagcatatggggcaacgaagtggacctatgggaggacggttttgtatggtgaatcacttgtaaaattataatctgtttgtacgcggaaagcgacgtttgagtttcagattgagcagcacaattaattcaattgattgacatgcaatgacattcattattagacttgatcttcactcctgcctctgacttggtcggccatgggtcctgactttgccgtagtgatctaaaaacggaacaccgcctcctttcaagagatgccgagggtattgcaatcgacaggaaaatcccctcagactgagtagggcgggatggaaacgggtttagagcggaatcctacacctcgcaatcagtaattaatgaatgaggaagtagctgtgaggcgaacgacggccttgaatatatatatgtatctacgaagagatgtcatgcgacactattcccaattcgctttacttaccggcgaatctctatcgaaaatatgaagttcgagtattcagaaactcagcaccttgaagatttcgatcgagtgattcgatcccacttgaagaagggttgccctgtacggttgaacaagccatcggagcgtgccgtcaagaaggccgaccgagatcctcggattatagcttggcgttcatcctgagcaaaatacgagtgcatatcgacggagataaaatcatccgccacggagaatttcgattgtgaaagactgcgatctgctgcacgaaatatcgcgttgcgagctcaggatatggcatattatgctacgccaatgatgccagactggacagagcgcgacgtcaccgctctgagacaggttctgaatatggaggaagatggtgacgttgcatcaccagacaattcactgggtactgcgagggaaacagtgacccaggaaggttctacgagcgagaggaccatcgtctcgaccgtgatcgcgaagctgtccagtctgttatttgcaagaggaagttccaaagatcattctgcctgaaacatacgagaaaatctgcattggccagagccataatcttccgcgcgtcttctttgacgaagagagagattcacttcgctggtaatcatgacaaaattggttcgatatggaaatcctcatatccagtacggataattcgagttgtaaatcggcttcgagttcgctagcgcccgatcccgctgtctttggaaaagagcgatacagaaaatggcctggatacgatgtcccgcaaggcggtatggcacaatacaagatagacaaatctgagatggaaggtccatagaagaatgcgcctagacttcatgggtggttgacaatgatgtcgtcatgggagtcttaagggcaggtcggtgctagttcaaagcatgcttgcgcttcacagccggacacatcacgatcctagagtataccataggggagaaagtttccagcggctcaagcagtttcgttccgcataacgctaccgcgacgtgatgtcctgacaagcgacccagccgctgacgcacaaagacgcttataagggatgagaacgatccactatatgagaattccggtagcaggttcagggtttgatccgaggtcgctctgcttccttgactcgcaggtatcgggtttcaatcgaaacgcgcggattggtcccgtcagctgtggtacacgtgttgagcgcagacaaagcacaacagtgagctctgaagtgacgatgatactgatgcatatagaggtttcaatgcagactcacttccggacgacaaccgaaggtactatcattgcgcatgatcttcagccatccgcggattaccgattgagtcgagcacgtcttgccaatgagtgatcccatgacctggtcggctttcctttgtgttccgaggttgtttgaaaggactttatttgactgactgtgtgatgcaaattgatatatatatgcgcaactgaagtcgggctcagatctaacatgactagtccttcgactcttccaaagctaagacattgttgccaacattttaagcttgaagttatggacgccatcatcatcgccagacactatcagcgagtccgcacgatccgagtattgactgctccgatgtgtggcatattcttgcgttgtcacgaacgtggcttgagccgtgaatttgtgcgatgtatccctacgatccaagatctacagagagcttgccagtccttgcaccaaagaccagacgatccaggcttggctttggaagaggaaattcagaaagttggagtggtcttggatttctggcgacgaagcgaggaaggtgggctggaatatgcgcttctgcgggaaccttgctttgaacatctccaaacgatgtgcgaagaagaagacgaagactcggaagttatcctatcctcagacgacacaactcaggtgggtgctatacactccatgctcagccgtacatatagcacttaccgctagtaaagtctccggtgtctgtcgccgagtctctcgccggatctctcgggacatcgatgccgacgattatgtcagccgcatttgtattgggctacttggggtggtccagttcttcgcgttcagcttgatccggtgcctagacttccagaggttccgcatgtgcacggcttgtccttgaagagagcagcacgcgcctgagtgatcccaccatcgtccggcgcgagcttacgtacgtggtggtagctttttgtcgattgttacaagacctcgatagttgtgtactagaaattctcgatgggaatgcccctctgtcgtggctgatccgcgtgcttccgtcaaattgcctgaccgacataacaaacccagtcgtggcttcaacgtgacgacatcatgatgtccgcgtgatccatagtggcgggtgaaacgggagaattcatgtcggcccggacgtcctttgttccaggcattgacccgcttctccgtctttagtatataatagtaacgaatataaatgtatgcaaggacagctttgcccctgagatagttgtaaggttcaacagaactgctggcattagcaaatccggccatccactcattctaacgatcatggttggccgcgatcgtacgattacttacttaaaatttgccgaaatggtcagaagtcgagctttataccgtgaacggaaaaggacgcaaaaactcagactaccggaaggagaaatggatataatcaaggcattgcaaaaggttcgacgggcatttgaactatacgtgatcctcgagacagctaaaatagaggatgctagggaaaaggaagctgaaggggcttgggaagaagctctaaagatctggaacgactggaaggaagactatggtgattacggtgggataacaaagacatatcctgagccgatctcagacgcagattggccgatggttggccagcgagtccttgactgggtatcaacggtatggtttaggtgaagagtctattcgcggtcaacggaagctcaactacgcggctttttgcagacgaccaaatggacgcacagcgtgttcggaagctctaggaagattgatgtatccagcggcgagaatcggcaggatcagactgctttactacctgaactctcccattcggataagtccggctcagaccttcgaacatgcactttggatcgttcagtatcaaacctttcagcacgcactagtagtctgggctcaattctactcgaaccccctccaacaacagcccggtcctttacatttacgtctgtatgatgtgcggtattcgcgtcacctgtcgaacaagcaaccattggagcatacgatcgatactcttaacatgaggaattcgattcgtgagcctacaagcattcgagtggctgacccagccagaagggcggtcactgtaggcaaatatccatcacaaaagtgatgactcaaagaaagcaaagcaaaggggaggggtggggacgcatacgacagggtgtaataactcctcagttttgacgcttcgtgacgagtaccaccccgctataagggttgagaactatcgatccatcatagaggtggatcagactcaatctatagtcgcattgtcggatattaagacaaactccacagcagtttgttagccccgttacaagtacatctttgtacagtcgtgatagcacgcttcgcgaggcccgccaaacttctgttgtcgaggaggggcggcgaattcagctaacattgtcacacgatttcttcattgattatgccagagaacagtcgcggccatctcaactcatagcattgcagccacacacacgccatatagcaattcgccagatatagagtaaagacctctggcctagattcggtggcctcattcttggcggcaacaaggctgaaggccagtgtcagccgtgctatgacatgcattgtccaatagcatcagcttggggctcatgacatgtgtagtctgatagtactctgccctgaagcgttttctcactatttcaaatacaagacacactgattctcgatatcgtcaattgtatcaggtctgactttcaataatgaaatcacgcctggcaagccctgaatgacctcgttttgacttcctttctgccctcgcgtcatcgattgggccatgggaaaattgatggagtagcatataaataggggttcatttggcttagaccatactggccggtgtataatacttgacccagctgcatatagctccgcaagtgaaccactttcatcatgaagctgaaacgacacatcagaagggtggatacgatcgcctctcccgcagagctgcatctggctcggatgtttcacctgcacagcgacgtagcagcaaaaaaatttgtgagagacattaggtcagctacacgacatgtccagcaatttggccagattatcgagaggtattgcaagaaggaaagtattatcgccgaggaagtcattcttgccagtgatcaagaacagtatgatccgtttcggacatggcgacgggcgtgtgccaattatcttacagtctggaaccaagcgaagcggatggagaattcttgtgccgctctggcacgtttggagggctgtgctacaagtctctgccacgcgcggatggcgataaggagccatgctccttcggatccccacgatgctccgatgagtttggaagattgtatcgtcctgctggcggttctgaacgaatacgagagaccccaagcgaggggacaggcgcaattggagggaacagaagcgactcgctccgcaacgaacgcagaagaaacgtccgacactgcaggcggggccagctgggatagtgacgatgaaagcagtaaacgggatcgatacgaccgggtttcagcgatcttgctgcgttgcgacgagacgcctcgcctgtccacgagtcgatgggacaagctgagcggatataccaccagtctattttccaaggcaacgggagggtcgagtagcggcgcgatctaggagcagtgtatttcaagtatggtccatcaatgcgagaatacgggcttgatgatacgacaggtcaatctcgatcaaaaggaatgtctataggccagccgcgggcctccgtattggccatcagttattcagttatagactgcatcagaagccaccctgattcctgatcatttaaagcctccacagagtgactagttattggtttccgattacaaaccgcaaaactgtaccctattacgacgccagggtagagctgccgcgcctgacatttcgaaatgagttaccttacgattagtgaaactttcaagtcttgacgtcacattccacttgatcactacgagcgcctaggtgatcaagctctaaagcaaatggttcctgaactgtcgatagaggcgatctgctagcgtatttcctgaccaccttggtgatcgggtcccaggaagcgaagagtatcccaacagcagcgctgcacgccatgctcgcgcctaccagggtgatcaaccctggagaaccagccgatccccatctggttcggccggccttgctttcacggtatagtgccgaaccaagtgtagggccgatgacagctcctatccctcttgcagcggaaaagcctgaccgcgatgacaaaccccattcagctgagtcaagggcgcgtagactggcgacgatgtccgtatatcgactcacacgagaccaacattgtctgctgctccttgtcaggcccgacaatctgatatgcactctgagaccacattgacgagaaccctccgctagctaccccgaagagaaccgcgaaaggagcgagcagagcgagaccgtgacctccgccaaagccccacagggtcagcacaagacagctgccaattgtggagctcaatgccatggcagtcgacggctgcattcgctgcgaatcaacccaatctcaatgaccatcacagcgagacccgggggaagtattataactcacatcggtgaggaagccccacagaatttgagcagcgatgcagctgacgttgaatgccgatagtagtccagccccagcagtgcttccgagggtatccgagaagcgagggatgaaaagcccaacattgctgcgacggaaagctcctgccgttagcatttctagttaacatctagatctctgttctaggcttacaagaatccgaacccctgcaagaaggttgccaacagacaaccgaagaagcccggatgccagaacgtttgcttcaggttaggcatgggcgctggcgtgatgtgtcttgtcgaagagatgggtattctagggttgaggaaacagatggcggtgctctgttcgcatgagcatgctagtcggatcagcgtctgtgtgcaatttcgctttcagcggaggggtaaagactcacgcctagcagagctgttgtaagcgcgctgatcctgaatgtccaagcgaggcctacccgttcgagcaagaattcgttgaggatcggcatatactagaaagccacgagttcgtatcaggctaccaatcgagagcatctaacagtaaaacacgacttactgctccaccaacaccccctcctgaaaaaatgatgcctacagccgaccctttgcgtttatcaaaccacctatttaagacactgtgcctcagtggtgataatttacagtgcaatagatcaggtggactcactcgggcacccaacggatcatcggaaaagcgcagagagccccagccaacccaggcccaactccttgtagtacgatcaggccatttacgcttctcgtccagctggcaccaagcatgcacgagacgaagattgcgaggccgagccagatggttggcttcatggcccttgggtatcgattatagaggtagataagggggataccggaggaatctggtcagaataagagactcttagcgtttagcctcctcgatcgaggatcggacccagtgggatcaggtatcttacagcctaagaacagcgaaactgttccgatgagcgaaatcttggtctcggacgagtgagaaaaaggcttgtagccggatgtaagcaacgtcagcgtctttcccctcacttgggtctgagcacatccctcgcatacctctgtcacggaatagtgcttcaagaaaacaccggtcgaaaagagtcctccccagagcagcatttccatcgtgaaccctgcagccacgaaagaccaagcttgacgacccccgtcgatctgcggcaaggcaagaatctgccgctcggtagccggttcatccattgacgcttgggtgatcatagtgtatatgccccagtggatggaccataagaatttgcatgcctgttgctcattagagaagcagagatcgagacgaaacctgtagagatatgtcctgccctcagcaaatcgaccgagtcactccatctgatcgtactcgtaatgtcgggccggcgattgccgagcgcttagaggtgattgcctccgtgtgtgtgtatttccaccttgtatgtcagcgcaagcgtcgcgcttcgatgaaacgctgcaacaggcttcctgagccgcgaacacgataagggcttgaaaggctagctcgagtcaacctttgatacaggtcggatggtcatctttcgcacctcgccctccaggattttaactgcggtccagataggcaagggcttagcttcatcagcagcgttgcgcgaaccgtccgaaatgccagttcatttccacacgcaatcataacatgttggcagtccatttgatagtggcttgtgtccctgacattcgcacatcttcttggcctgcttgagtaaccgatgtcactctctgcatatccctttctcactaaaacaggagctctccgcacgggacggcctgtttgatgcggagatagtcattcaaatatgccacagactcacacaaggtgattgttttgcaccgatagacgactctgatccagtgaacgaattatttaggtaacaacaagactgaggtgaaaggctcgccctgtgaagtcatgatacatatccactatcattcacgaccaaacttttcactacaggttaaaacgttacaatcagagtctcttcacccagaacaaacactggatggaatttccagctcgagacacaccctgcaatcgctatccaaagcttcgcaaaggctgtggcgggcagagattgtacggtccgacgtatcaacaccgtctcaacttggggtcacggatattacgagtctcgattcaatgaccgttggtctcttgattgatgctccctccggcggagcctggggatcttgcaagcctgacccactaacattgtgtagtaccgatggttggtgatatgagttctgtcttctgctgaatcacctcaggaaattcaccgtcgatcgcccatcaatcgtcccaaccttttcgtgggtttagtcgattacagacgatgacctccaacacaaccgcatcatgtaggcgagcaaacatgtttgccaaacaggaagcacgtcattttgcgtgcggattctgggcacgacaaaaaaaggcaggagggcagaggaggacgtcacggagatcttcggcagatcaacccctttgtgcgagtgtatcattcctttgtgaaccaagaaccaggcaatattgggtgccatcttcccgtatgcgcatatatatcgggggggagggggtttcatcatccgcgagacgttaagcagaccccctttacttgtaatcgcctaacctctctgtcaatcgcatatcacaacggaaagagtcggtcagcaagatgtcggatcagctgcaatttcgatccttggtcggtatggtgctctcgctggagaaagactgttgggagaagacggccgagtatctgaagcatagtaagccggttccggacagagactacgagcttttcggagacttcttcggcaagcttagccgatatgagaaacttgaagatgacgccgcgaagccagcagcacgaaaggaactcctggacttttggagcgctaacggagggaccctgcagaaccgatggccagatctgatacacgctgccgagggtttcaggcaggagatagacaccgaaaactccgcaagtgaaaattcgaccaccgctagttcaaagcaagttgtaagcaatccagttccctactttagactgtacaagctaacatagcaattcacaatttcgtacagcctcctggaacccctcgagacggtaccacgtccgacgaaggaagtgtggtcactcctgctgcgtctagtgttgaaactcgacgagattgggttctgagcccgcggtagtggtcagcgaacttgaaagcccggaggaaaacatttgtatcactcgcagaccttgtgcatgtacaacgattccgatggttgcgcgagcgatgcggggaattcctgttagaatcctgcatgttatcatagtgcccagttctattctttctccgtatcatgcaatcgccagagtgacccgatccgcagcgctcaagcctccccgtggactttcgacaagatccgcagcgcacaactcgtcccccctccttctgctcgcgcgccaacaatcacgatccgcagttcaacccactctttacctctcacgacatttcggcgttcattcccccccccgccttcctgttcgctgagttttctgctgagctcatcaaaccaagcgtgccgagctagaccgacgcgaagcgacgccctttgatgtcgaatgaattattgatccaacgtggttccgaaaagcttctcctggactgcttggtcgaccggctcggcgtttccttggtacgacccgagtggacgagtgggtcttggggacggacgatccccgaggctttagcattctcagcactctcgaacgattttggcccgagttcggccgaccactgctcgaagacgacgacgacgccgacgatggtgatgggatctcgccacactatgtccagacctgtggaccatgaatcatgattctttctgagagggccaagccagggccgagacccggggatcggcgttgcacctcccatgcccccatcccctctactacacttcggctcgtaacctggccctatcgtgcatcgtgtgactacccgcggtggtttgatcaggggcgaagatgtgtacggcatgttcgcggtcgcggatcgatacgtctactacgcctaggggtacaaaggttctcttgggcccaaagaccgacttggcgatcgtgacaaggggtggcggggtagggcccagggaatcttggagatgctcccgcgtcacattgacgagttcgcctcgtgatcggggagttttccgagctggccttgatcgtctgatcgataggggcgagtcttgattggaggggatcatgttcagagccgatggcagtcagcctccgagtgtagggtggggagagtgtgatcagctgtcttgtggcggtcggtgcgaacgtgatgcgccttgggacgtggatgtcaaatgaaaggatcaaggcccgccaggggagcagatgtttcgatcgggtcgcgcaggggcggtcggcgggggtcggccttctatcgggtttgtatggtgatcaggcccaaaggagcgatttcagaagacgttcctcgttcattagcgcgtcggtaggtcgtcgacttcacccgcccgctggctgatcggaccctgagtgatgcatcgcgcgcgacactgggcctttcacgatgatttctgactccctggctcgctttctcacgcgttgcggttgatcgcgtaagtgatatggggaaccgcttagagcgacatttcagcttccgcgcaccaactgccaagactttgaatcaatctcttggcaactcgatattgcggatcgcctcgcaacgaatcgtttattatgcacttgcccacatcgtcgaagaagtagttgactttgaacgtgcatccctgtttcccttctctcatcatacaacgccaccaccaacactcacgatcacctcttttacgaacaacgatcaatccccacataccctctttctcctctcttaactgaataggagactgaaccgggcttgatcaacctttccatcccttttttccgcgcacgccaataacaacttttatcgtcgtcgacgtcgcatcgctctgcacaaccctacgacctcagacatcgcaaccgccatcatggctcacaactcgacgaacccgaggatcgtcaccaccgacctcgacgagcctcatcggggtaaccaggacctcatcggtactgcccccatccacaacgcccgcgccggtgtccttcacggagacccccgcgatgacgtcctccattcggtcaacctccgatcggagaacgaaaaggccacttcccacaaccgtgcgccttcccacggtactcacctcgccgtcgcttccgaccacctcagccccagctctacccgatacaccggcaaggatggcatagacgagaagactggatacatcaaccccgtgttgatgaaccagcctaccgccaaggtccacaagcgatccgctatgagcaagctcaagggtcttttcagcaagaagaaggactctgagctcgaagaggaagacgattccgaggaggagctcaccgaggaggagaatgccgctcaggctcgcgcttcggcccatatcgaccctgccaacgatacgaccgaccctacacccttcttccagaagcctctcgtcctcgcctcgttggtcgaccccaagaacctcgacgaccttgaagctatcgggggtgccgagggcctcttgcacggactcggtgtcgacggtacccgcggtctcaacgccgatggtactccttctgccggtcccgggatgatggacgcccagttcaaggcgtctttggacgacaggaagagggtctacggggataacattttgcccaccaagaagaccaagtcgctcttgcaattgatgtggatggccatgaaggacaaggtcctcgtaagtcgcgcttcgattctgaccgtgtcttccgttgagcttcggccgacctcgagttcatcctatagatcatcctcggtatcgccgctgttatctcgcttgtcctcggtatctaccaatccgtcggtgtcgaccacgaacccctcaagtttggtgaaaagggctgtttctctcaagaaggatgtgaagagcctcagattgaatgggtcgagggtgtcgccattttgatcgccgtcttgatcgtcgtcctcgtcggttccgtcaacgattggcaaaaggagattcagttcaagaagctcaacgagaagaaggacgacaggatgatcaactgtatccgtggtggcgtcaggatgagcatcaacaccaaggtgagtaggcgcgcgcgcttcggatgctttttggttcccctcgcgccacccaacgtgctgacacgtcatatcatcccgcaggacatcctcgtcggtgacatctgtgtcgttgagactggtgaaatcttgcccgtcgacggtatcttcctccgtggtcacaacgtcaagtgtgacgagtcgggtgctactggtgaatctgatttgatcaagaaggcttcttacgaagagtgcatcgaggagcgcaactcgttgcctcccggcaagaccttgaagaaggactgtttcttgatctctggtgccaaggttaccgagggtgtcggtgaatacgtcgtcatcgccgtcggtaccaagtctttcaacggtcgtttgatgatgggtgagtttggcgtctttaggtctcttctttgtgacggtgcgatggctgacctagactcgtggtgcctacagccctccgtaccgatgccgagagcactcccttgcagatgaagctcaacaggcttgccgagctcatcgccaagtttggtgcttctgccggtgcgaccctcttcttcgccctcttcatccgtttctgcattcaactcaaggagaaccccgaccgaaccgccgacgagaagggtcaggctttcatttcgatcttgatcatcgccgtcaccttggtcgtcgtcgccgttcccgaaggtctcccccttgccgtcaccctcgctctggctttcgccaccaagcgaatgactcaggaaaacttgctcgtccgtgtcttggcttcgtgtgagaccgctggtggtgccaacgtcgtctgcaccgacaagaccggtaccctcaccttgaacgagatgcaaatcgtcgccatgtcgctcggtgtcaccgccaagggtgtccgacgattggaagagaaccccggaaggaccaacgccaacaaggtcgaggacgagaacggtgtcgccgagatggaaaacacccgaaccggccgacccgactttacctttgacctcgccgagttgaaccagatctgtacccccgagatgcaacagctcctgaacgagtcgttctgcatcaactcgaccgcctttgaggaagccgacaaggaaaccggcaagatcggtatcatcggatccaagactgaagctgccatgctcttgctcggccgagaggtcggatggaccggtgctaccgaactccgtgctgccgctaccatccaccaggtcttccccttctcctcagaggtcaaggccatgggtaccgccatcactttgcccaacggaaagattcgactcctcgtcaagggtgcctcggagatcttgctcaaggtctgcacttcgcacgtcgacctcgacggtccttccaacaccgcttctgccatcaacgtcattcgattcaacgaggaaaccatgaccaacttgcagaggaccatctacttttacgcttcccagtgtctccgaaccatcgccgtctgttacaaggactacgagcccggtaccttccccaccgccggtgaagaccaggagctcttgctcgccgacctcgccaaggacttgaccatgctcaccgttgtcgccattgaggaccctctccgaccgggagtcatcgagtcggtcgccaagtgcaacaaggccggtgtcgccgtcaagatgtgcactggagacaacgtcctcaccgcccgatcgatcgctactcagtgtggcatgtacacccctggtggaatcgttatcgaaggtcccgctttccgaaggctcagccaccaggaacgtctcgagattgtcccccgtcttcaggtcatggcccgttcgtcccctgaggacaagcgattgttggtcgaatccctccgagagttgggcaacattgtctgtgtcaccggtgacggttccaacgatgctcccgccctcaaggcttcccagatcggtttcgccatgggtatctcgggtaccgaggtcgccaaggaggcttccgacattatcgtcatggacgactcgtttgcctcgctcaccctggccatcaagtggggtcgatgtgtcaacgactcggtccgcaagttcttgcagttccagctctctgtcaacgtgaccgccgtcgtcttgacctttatcactgctgtcgcctcggacgaggaagagtcggtcttgtcggccgtacagctcttgtgggtcaacttgatcatggacacctttgccgctctagcccttgccaccgatcccgcttccgagaggtcgctcgacaggcagcccgagaaggccaccgctcccttgctcaacatcgacatggtcaaaatgatcctcggtcaagcctgttaccagatcgtcgtctgctttgttctccactggcgcggacacgacatcctcggcgaggagttcggaggcggaaactcggagctcaagaccttggttttcaactctttcgtcttctgtcaaattttcaacatgatcaactgtcgatctctcaccagcgacctcaacttctggcacggtattcacaggaaccgttggttcatgctcatcttcctcatcagtaagtcggccagatgtttccggagtccatccggcaggttgcttacctgcagctcgctttgtgctttatagtggtcggtggtcaggtcttgatcgtctttgtcggtggagccgccttctcagtcacccgaatcagtggacgagactgggccatctctctcgtcatcggagtcctcgccatcccctggggagcttgcatccgtctcatgcccagtggtcctctctaccgtctcttggtcaagctcaaggtctaccccgaccccaacgctcttcccgagctctcgcgatccggcgactttaacagctaccagtacgccgagcccgtctaccagaccaagagcaacctcgacttgttcaggtcgatccgatccgagagccgtctccgtgcctcgcccatggttctcaagtctcgaaggaggaggatgaaggatgccaagctccagtaccctacgttgctcaccatggctccttcgctcttgctcggttccgtcgctgccggtcagaactggctcgcccccttggacaagctcggagagaccaaccaggccgagaaccagccttccgttcctgcctctggcaagttgagcttccacccggactcggacaagaacgacccggtctaccagaagtacgccaaccgataggtggtcgatcgtgctcgcgcgcagacacaaaaatgaaacacgcacactacatcaaaacacctattgggaggtcggaataatttcgggatcgtcctggcctgcgggcagacgaacagagtcggagagttgtaccagtactgcatatataccccttatacccttcctttgtcgctctttacgcatgtatctctagagtagttacaaccatgattttcgatggaaacattctcctttcgactcgagcgtgatgagcacctctttgcgttgatggccgcctgttggtgtcgattgctcaagacgtgtgcggtttgagaaccgcagtcacgttcaagcgtgtctggtcccatagtaccacagtgagatccgctatgacggtcccgagatgcctacctctgagatcgccgccctagtctacactgtggtcaggcaaacgatcgcgagtccttcattacgcttttcctctagagggagagaagcgcgatccccgctcgctagacgttttgggttgaaacgtcatcaaagggtcacgatcgaacgtaagggtgagtgcggatccaaaatatttcgtgtttgtcgagatgtcgtcatcgttttatcgaccgcgccccggtcatcgagccagcgacggcggaaagtgtagggaatccagtgacgccagctgtggtgtggcgcccggggtgagtgtgatctttgcggcgtatgtgtgggtgtgttggtgggtcgggaggggcatggtcatggctggtagcagtcggtggtgatgacatgcttcgcttccgggtacggcccagcagcaggcagcgaggcccgaggagatcggatgagatcgtacaggtcatcagatcacgacattgccccgcggcgaagagatcgtcggtatatataccaacacttcaacctagacacatatatcacccactgtattccccactctcttgtagcctcccatcgcttacgtacaccaatccactcgacgctatcttcaccccacacatcaccaaccaaatcaacatgttcaggtccaccatcgcccgagtttcccgacccatggctacccgagggtacgccgacaagtgtaagcgcctggtcctgttctacctcgtcgttctaccgtacttgatcgctgattcgcatcggtccgatcgtgtgcacagccgtctccgagaccgtcggtgacgctctgaagagtgccgccaaagccttctcggccggagatgccactggcgacaaggccggtagcgttggaggcaagttcaggtccgatggagagatcggcaaggagggcgagaagggtgagtttgcatttctccttgagcttccaggggcacgaattagagtgaacttggttgctaatctcggacgtctgtgctttatgatgatgtgcttgtagtcggaggtaccttctcctcgcaagccggtggatccgtcggatcgcagtttgagaaggacggcgctgttggcggagtgagtcccccttatcctgccttcccccatacattaccgtcctctgaccactcgtacttcccttaccgactgcagactgcccagaaggccagtgacaaggtctgggacgccggcaaggccgtcaagggagagaagtagacgatcttaccctttgatacttgaccctatcacgagtcggaccgagcacgaatccaaattagaaaagagacgaagagaacgggatgcagagagggagagaagttattaatgtatcgcagtaaaacgtaacgaagacgtggatcgtgattcataccaatcattagcattactcgaacgagctcgggctgacatgatcggatcgtcgggttgagatggagtgatcggtatcgcttatcaggacggggtggtcaacgtcggcactccccatggtcaacgtctgcttaccatatcagaacgcgagggcgtaacgagtcattcgacggtacgagtgagggaaagtttgttcgcatcccgttggtccatcccatgtagagcccgtgacgctcaacagtagaacggtagtaccccgcttgtcaaccgagacatttcgggaagccgagcgcgatgaactgaacagtcgcggatttgtatcatggggaggggttggatctttgatcggttctgccaagctctacgtgcgatagggcctcgacggtactcgattcgagcactggtcctcccattatactcgatctcattcgctgcatagcgtcggcctatcgatcaacgaggctgttgttctccgacagccgcggcgatgcgcaagtctatttcggcagaattgaggtgggcccatatatctgaatacgcctgttcgacggaatcaagaatggattgtttgcacttcagtttcacttgaatcaattgattgatagctggtcatgagattgtctcgaatacgagttcgaacagttcgaagctgaattaactcctaactcctaggtcgtgtgaatccgtcgcttacgtaagctgatcatcacacacatatccccctcatccccttccccgccggtcaaccgcggactcagccaccggagcagcaatgacctgtcccttgcaactcgactgcacaaagtggtgagatcgtcctaacgctcaactccaccgccctgtgatccacagcctctcttatacaacgaatgggatcgggatatctgggaccatgagtacagaaccgagcaaaccggcaggttcaccaccggacagtacggtctggagtaacgacgtggccggtggaggtgtgaatgcgaatacagtacccggcaacgagctgccttcttcaacaacgacagcgacgaccggagacggtgcaagtggtccaactgctagtaagaagaagaagaaaaagaagaagcaacagcagcaacaacagcgacaggccgagttgaagcagaaggacaaggtcgacgaagaagcgggagaggatgaagaaggggaggatgaaatgccgaccaagacgcctgaagacttgaccgtaagtgtcagagagaacagacgaaagagggagctgtgaactcagtgaaatgctgatgttcacttcgagcacctgcagatggaacaacctgaactttcaagcaaatccgagacagtaccagaaccgacgtcggaccttcaggctgaagctgtcgagcaccccggtcctcctcatcctgctgccttggactcatcatcaccgatttcgaagcctgaacccgaattgcaagtcccactggccgaacctttgtccgccgttcccatgccggaagagacaaaggagtcctctgcacctgatcaagaagacttgttcagcgcgcctgtcgagggagagacggacgacctattcggcgggcctgttcaagcagagactgacgatctgtttggaaaggtcgacgcagaagaggtcgagacgtcggatctgtttgacagtgcggctcctacggagggaatgctggttgacgaggtccggttggaagagcctgttgttgatatcgaggagatcgctgtaccgatcggaagcgctacgagcgagattgaggaggctcgccataataagggtttacaagcggacgcagagtttgagaccgtcgatgaacctacaaacgtgcagcctgataattcgaatcacggtgcagaggagacgtatcgatttcgtggccaggcggacacggcggacgacttgtgcggaacacaacccgttgcggatgatgctttcgattcctttatcggttctaccgccgtaccccccgcgcccgagcgagagcccgcgctcgacacgccagtccaggcgaaagaagacagcttgttcgactcgatttccccctcgggcgaggacgatctgttcggtgccccgcccgtctcggaacctttcgcactcgagctgtcctcgatcgagactgtgaaacctttcgaaggacaatccggggatgacgacttgttcggggctgacgagaccggcgcagaagacttgttcggacactctggtcagcagggtgctagctttggagaagcccaaacgcctgccgcatccgtccagcgcgaggcagaaaaggtggatcaagcgtcagcaaaaccgactgactttggtgcgatcgtgctcgattcgcctactgaagatccctttggcggacccgccgacgaggtagaagacgatttcttctcgtccgttgcaaaacccgttcaaccggaagaaaatcctcaacaggccaatacaatcgatacacatgtccaagggcgttcgcgagcgtccaccaaaacctcggatctgtttcaaggggacgacgctggggatctgttcgctgatatcgggcagccaggtcaggttccggaatcggccgcagacatgaagtcggatcgagagcagggagaagaccttttcggaacctcagcggatgatgaccttttcggaaacggtcaggtggccaatgtggccaatacgatagacgagcccttcccaaacccagcaacggatgcaccggttgtgtctgcaaccagcgagaatgttttcgacactaccgagctggacttgatgggcgtcccagagggttggatggatggcgaggtatggtgttggtacaccgaggatgaacggaacgaggttgctaagcagatgatagcagatggtactgctgaagctcgttagtatgaaaattacctctctcggatttcgactcgtgacctaacgtcattctgaccacagccgagagaaaacctctggaatcggcaacgccccagctgcctgcactcgcatcgcacgcagcgccaacgatcggcccttacgcgcctgtgcctgcccagacatactcgccgatacaggtggacacatcctcggtaacagcagcgataccttacgtacccagctcgtctatcagtcgatacggcagtccagctgtacagtcatacgcctcaccggcctacgcaccttcaccttataccccttcaccctatgcgcctgccgctccaaacaactttcagaacacgggcccatacgcctcgtcgagtgcaatgccaaagcacgtcgtctcgccgcctgccctccttcaacgctcggcaacgacgacggcatacgatccgcctgtgcccgcatcgcggaatttatcgcgacccccgtcagctgcaccagtactatcgcagtatgctcccttctcgtatgctctaggccctgctagcacgccggtctcgcctccgtcctcgacaggaccaccccgatcgagcggtccgtctcgagggcccgcttccgtcaagtcttcactggttggccaatctacaccaacggcttatgacccaccggtcccgtcgatgagccgtcagccaagctatgctaagctgaagccagctgtagaggttgcacctcctttgccgcctctaccccaggcactgcctcaaccgacgaacagcctcgcatcggtagctccgcctcctggtcctcccaggggaccatcaagaagcgcgagcttcatgcagcctcctcctactggcacgtatcggccaccttcccgagcgagggtcgagacgtccgaacaacaggcctcgctgcggcccgctgcaccaccagtacctcctttgccccgagacgtgtcagtcgcggctgacccttcctacgggttgcccgcgccgccagcaccggctgtagtgtcgttagctcaaacgacaccctcgcaggacagcggccggacgtccgttggataccaggccccaccgtcgactgcccaggccgttagtatgcttcccttgcctgtgaagggaggcctgacgccggcgaacgctggaccgtcgtacgaccccgctagctcagaaccctcttccgctaccgcgccaggagtacaccaaatgactccgcaacgaagcgaagctgtcgacttgcctccaagtggagagacttggcctcataatgccagtcctgctaaaccccggcctctgctcagggaagacactttcgatcccccggcactatcatcgcaagacgacttctcctacatcgacccggaggacgggccgcttgaagacgcggatccgatggccagcgaatgggaaccgccgcgagtgacagacgatccttacaagccagctccccctagctacgtgcctgcgcctagtcagccggcacctaacgactatcagccatatgtggcgcaggcggtctcagcaccattcgatccctaccagccgaaatcccaggacgtccaggaaccgtcgatatatgacacgcctgtacccaacacatttacgttcccgaacgacaactatggttctcccgccctgtcaaatggctcgccagccgtcagcggatccgcgtatgagccgacatcagagagcgtggccaagcctctttcggaggatatcctcgagcgagcatcgccaaaggccaggcgcgtgccatgcgtctcatttggtcctcagggccaatgcgcggttgtcttccagtccgagtcgagcgggaatgggtcggagaatggccagcggctgctaccagcatatggagatcgttcgcaagagcaaaaagtgcaactgcatcaattgaaggacgtcattccacaggaaggcgtatcggcaaccacagcagattggccaggtccactcttcatcgatgcagccgcgagcaaggtcacagcggcctcgaaaaagaagcgagatgccgtcaatgcatacatcgacgcccgagtacaagagatccggagcggactcgtctacctgacggcttcgaaaaatgatcaggcgagccgagatagggcagaggcgagaatgctaatgctggaaatcgttaagttgatgatcgccaatgatggcaaggctcttcaaaagtgagtttcaagctcaggtcgaaaccctagtctgtggctgacgaaagatatgactatagcgatgtgtcgagcagaaatgaccttgtcaatttgctatcaagtcatgtgccgagcgtggagggagaccctgcgctgcgtcaacgtgccaagacgaccgaaccagtggcgacggccgcagatctgcaatatctatctcgcatgctcgtcaagggacagcagctggaagcacagcaatacgccatccagcaacagttgtggtcgcacgcgttgctgatttccagtgtgatgggtcctcaggcctggcaatcttgcgtcgacgcattcgtgggacagaccgcgtctacacacgatcttggtcaaccattgatcaccgcttacaaaatgttcggtggcacccaacaattggcgccgtcatcgggtcaagctggggcgtggcgggatagtatcgcgaccatcgttgccaacgcaaaggccgccgatgtcgaaaccctagtgaagctagcggaccaactcaagcagatcggtcttgtcgaggcttcccatgtttggtgagccgcatgggttacggtctcgccaattttcatgcttacaccgctcttctctttgcctagctatctcttgtcccccaagttgaccgaatgggctgccgggtttgatgtcagtcgtgtcgccttgttcggttgcagtgacgtgacttctaccggaagagatctcgagatttccgaactggtcgaatacgcactttccttcagaacagtggccaaaggagccgagccatatcatggcgttccacgtttgctcgcctacaagctacaaaaagctttggagttgttcacccgtggtcaggcctcggaagctagagcgtgagtgcaacccggatacgacgagcgtaattttagatctgacgctcctgtcgtttcaggtactgcgatgctgtcttgtcgcagagcaagtcttacaaatctccaaaccccgcaatcactgcagtcttgagacacgccgagactctgtctggtcgaatcgctggtatcgcagtcacggcagcggccactcggaagggaggcaagccgaacctggaaaacctgggatcgtggttcgagggtcggctcaccaagttcatcgccggtgatgaggaggcggacgagaagcctgctcaaccaagcgcgggcaaagaggcatcgggcaaggcagcgatcgggcctttctcgcattacagcgctatatcgtctcccaacgccacgcctaatttgacacgcagctcgacgtatgatcttgcaggccagcaaggagctgcgccgggacctcacgcgtatcgcagcggttcggctgcgtcttacagacctcgtcaaccaagccagctttctatgcagcgtccaacatcagccatgtcgtatcacccgcaggaacagtctgctttccccgaaatgacccgtataaccagcaggatcaatgagcaggatggtttcgacgctcgccgagattctgggcaagagataccgcaagacacacaagctacggctactgcagtaaccccgagtgaccctgcagcagagcctcagattcagatgccgtcatggggccagagctacgacgaaccagaggggacggaagataggcacgaagcggatgaagctgacgccgacgcaggcggttctttcatcaaccctatgcagacctttatgtcgcccatggctacgactgcgtcatcttacgatccatcagtcgccgctgctgtgtcctcacagcccgcatacggaaacgacgacgatgatgacttgggtcttgggaacacttctcacaagaagcaggccgtcaatgccgattccaagacggacgcgagcaaatcgactgcagcatcttcctcttacgaacctgtgccagcgaaagaagagccttcaaagcccgagccagccaagaagactaatccttccggttagtagttccggtaacgatttacaaccgcctatcgagacctgatgtcgagaactttcttgtagcggaatcgggtaaaggatctcagggttcatggttgggcaaatggtggggcaaaaaggaagagaccgctggtcctggtccagtcaaggccaaactcggtgaagagagcgccttttattacgacaaggagctcaagcgttgggtcaacaagactgccggcgcctccgagacacctaaagcagctcctcctccgccaccagctgctcgtagcactccagtgagcgccagtccggcatccaccccccatcctatcgcttccacctctaccccgccaccctcttctgtccgggacccttcgattccgcctgggagcggaaccgctccacctgtgcgtcctccatcagcatcagctccaccgggtcctcgcactatgcctccagcgggaggtccacggccgccaatgaatgcagccgatccgcctttggcggatcctcttgcggctcctccgatgagaaagcctgccgccaagggcaagaaggatctgcgtgcaaagtacgtcaatgtattgtgaatggaaggatttctgtaattcgcacggctggaacaccatcaatcctaatgtatcatattgagtggttgtaacgcacattcatcaacgctcgttacctttgggtgatgaagcctcgtccgggagcggacgttcaaaacgtttcgtatcgaggatgccagtgagacctaaggatccgcatgaacgaactagatcgagagcatatcagactgagcttccgtagtagagccccaaggaaatgagacagggatctcctcggctactgtgtttgtcagatagcgggtccgtacgtgtccaaaccgctgagggagactagacagcagattgagagatcagatgttgtttagcagctgtagtgtaatcgtccacggcagtagtggcgctgctgttcaagtcgaccctcctcacgacataccgtcattcacagcttgtcaacaaatactctatagtcaactctcgagcttgctcgaccgcgttgacagcgtctggtctcgcagccagcctcgaagtcgatgcgtcgccgcttctcttgatcctcaaaacctgcctctcgtgtcgactcgtcgctgaagaccaggatgaaaccgtgggaagcgcggctcattcgtgagatgatctctactttcgcagccgacggacgtcgttgcggaagctgtgattccagaccacgtcaggtgaacacgccggccgatcgtataaaatcgaaatgatcgtgtcatcgtcatcaaataagaacaaaatcccaatcccagcatgcagaatatcgggcgcggacgtctgattacacctttggtggatcttccatccgtgcccccgtatcgcgtgatattcccttgcgaccctactcggtcttcttctcgacatcctctgcggccgaaggttgaacggcggcgttctctcctgcgggaggctcggtcgtcttgactcccttgtcatccccggtttgcttcgattcgctgtggagaggccgtcaacaggcgaggggtcagtatcgccacctggcgcatctaccatggacccgacgctcactccatggcggtgatgaccttttcctccaagctaagctcaggcttgactggctcctgaccgttatcgctctcgagggcggccttttcaccctgggcgatagaggcaagacgtcgctatggtcagtcaggcatccgatcgtgggaaggccatgcgccaggggggcccaccttttcaccctcggtcttttcctcgacgtcctccttcttgctctcctcggcggcgggagcgggagcgggggcgctctccgacttgggtgccttcgagttgtcctcctgggccttttcaaaggcctccttgaaggcctgagcgtctacggcggaggaaacgatatcgcacgctcagttcccctctgcctacctcgcgatcgtcgtcgtcgtcgtcgtggactcactatccgagttggcaaacctgatcgcaaacgtctcggcagtaggctccgactcggcgtaatcggccgaaacgttccagacccaggctcggtcggaaccgaggttgggagcgagcttcatgtccgaggtgactgtaggtggtgggtcgagcgggcgaagttggcggcgcgacatggggatcggaggcgttcgagatgacatgaacagcacgagcgcatcgaatgagatcgagtccagcgatcgacgcggagttgagcgtgacaagacccagtaagaaacgcaaaagcaaagaagaggattacgcaggttgtcagtattctgtccgacgttaaagtgaggcacaagttcgatcctgatcactcaacccagacccgtggcaactgtagtcgcggtcgctgatggaaactccgggacagacatatggaacgtctagcctctcacactctcctctccctttttatccacctccacctcctcgtcctcttaacacctcccgacccgctcccttgcactccaaacacctcgcggtcgaaatgatctggccccggctctccgtctctgctgaagagacttgcgagacagccgcacctcgtcctcgtccttgactctagagatggcgaagcatttgctctcactggcgctcgtctagagtatgactcgcgctgctcgtcctgactatgctcgcaaggctctcgtctgatggtgctcgcaaggctcgccgtgatcatgctcgcggcttgatggtgctcgctctgctcgcctgaggttactcgctggcgctcgtctttgattatgctcgctccgctcgctggctcgccctgctcgcccgactcactcataaagttggcgcaaaccttcaacgtcttgtccctcctcatgacgaccctgactttcccgccctgtctatccttcaacaacttgacgtctcctgtcccgcgttccttccattcggtggctgatttatcaaacctgaatagcttggccctgaccttgtggaggacgtcttcatcttcctcggccgtcttgacttgaacctgttcggtgagtttgatgacgggctcgtagtgagggtcgtgctcctcggcctgcggtaggggagtggtcgaacggggggaggaatcagttcgggcaacttgggggtcgacaatgttggctcacgggagtggtgttttcgttgtctgccatgatgacgtggggtgcagatgattacttcgaggtgatgaacgatgagtggtctgtatgttatgaggtcgaccgagcaaaagggcgcatgcatccatgatccatgtatacattccatcaaaccaccaccttgaccatggctcgagttgatgggcgcctggggtgagggttgtgctttctcacgtgtcacatcagccaaggaaggggcggacattgaatagttttgatcaaaacacgtcatcgaaccgatgtccgtgtcgaaaagtgtatcacggcatcaacattctcggtagtaattacgttgccctcgatgacaacgacgagtagtctcggctctatttcccctgtctcccctccttgccccactgccactgccactctcacgcttccaacacaaacacagacggacgacatcatcatcatcatcatcatcgaccacgcacatgctatcacccaacctcgtgctagacactaatcatcccgtctttcacgtatctaccacaaccacgcacacatcaaaaggctccttctactcagatatagcagccacaacagcacgacccacccacccaagtcccctttctcacaccgcacacgcacacccccacgaaccgacgcgctcctcgcttcacaccatgtcccaagtaacttggacccccagcctcacccaacctaacctactgacccaggatcaaatccctcgtacccctcaacagatccaacagaccctagaccccctatcaggtcaccccggtcacctgacccaggaacaggaactcgcgttgaaggaattcagatcgatcttggtccaagccgggttatgccccgatgacgcccagttggagaacccggcgcagagtaccgacccgagggtcaacccgggtcccgggtataacaggtgggtcatcgtttagcgggttgtgtgccatgtcgcaaagtgactgatcaaccacctcgccgccgcctcacctcacctgccccaacctgccaaccaccctccatgcatcgtgctgcccaggttcgacgacgccaccctcctccgattcctccgagcccggaaattcgacctcgcccgcgctcgagagatgtggcaggccaatgaagagtggagggtcaggttcgggacggacgagatcgctaggtgagtcgtgcgtgagtcgtgggaaagtgcgggttggtgtggtgtggtgcgggttggggtttcagcgggattgcaaaggtttccggttacggggttaagggatcgagctcggatgggaattgcattgcattgggtcggtgaagatcctccgggtcctatttcgggggaatccgaggtgtcgacgacgtaggagatcctcgcacgtcctcgcagaaaaaaaatccgggtcggtccagatgtcgacgatggatctcgctcgcaatcgatcgtcatacgcccgggtcgccggcatacggactgggtgggatcgggttggatttgatgaacgaacgtgtagacgaggatgttctggctcgtctctcgttgaaaagcaaaataaaaggaaaaacaagggaaaagacgagtgcgggattgcttgtgaaagccctcccaaaataagatcgggttcgaccctctcattccgacgtcagaggtggacagatggcccttgatagcttaacgctggtgacgctcgtggaccgtcgatggaagtccttacggacgagatcagacttcgtcattcgtctcatccccgtagatacggtcggtcggactcactcggcgctggaaatcgtctgcttgccggaaaacccaacaacggcaccaaactgactcgctctctcggcgtttgcgcagaaactttgactaccccgaacagcgggaggtcgacaagtactacccccagtactaccaccgaactgacaaggtgagtcgcgccgggatcaacttgcgccccgcttgctgccccttacacccccccacgatcggcaggacggacgaccgatctacatcgaacagctcggcaagctcgacatcaacaagctctacgcgctcaccactcaggaacgtcagctgcaacacctcgtcagtgaatacgaaaagttcttgggccaacgtctacccgcgtgctctgccgcccagggtcacttggtcgagacgagttgcacgatcatggacttgaacggagctgggatcagcacgttttacaaggtcaaggattacgtctcggccgctagtaccatcgggcagaacaactgtgagccgtgactcgagccgggtcaggccgccagcgctcgtactgattgatcttcgcccgttttcgtatagaccccgaggtcatgggcaagttttacatcatcaacgtgagtcacgcgcttgtggcggctttcgatcgagtcgttcgctgacctcgtcgttgttgttgccccgcacgcgccaggctccctacctcttctctaccgtttggtcgttcgtcaagccctggctcgacgaggtcaccgtctccaagatttccatcctcggcaagggtttcaagtcggagctgaccaaacagatccccgaacaaaacttgcccgccgagttgggtgggtcttgtaaatgccccggcgggtgcagcttgagcgacgccggtccctggaacaagaactaggcgagccgcgtcgagacacccgaggtgtcgaggcctgcccagacttttgctttgtttgcatctgtagtagtataccccgccaccaacatgtttgacggatgataatttgacgagttccctctgtcgtccatcagctcggatcaagtgtcgcaatcatttcgtaggcagtggtacatgaccggcttgggtgggccacacccgggtcaacgcttccgcgcgcgctcggagactccaatgtgtgcgaagccgggctcgcctcggcgcggctcgattgtccgtctgtcgtctagcacaaatcgcgaagctagcgatcatcaggaaatctatccgaccaagaagcgccctcgtgagaccaggtcgatttgtatgtgaaatgcgtgccagacgccaaggtctaccgcttgatccaaagactacacgtcgttgttctctactgtctataatggaacggcgtaagagggtggaataaactttagttgacttgaacaggagaacgctcttcgtctcggactttcgaggtgaaccgggttcttgatgacaattcctagttttcacgcaatcgttaccgtctgactacggctcaacttcgtccagcttcatctgaaacctcccccatctgccacaaggacctttcctacatctcgttttaaatgtcgtgcactgtctttcaggttcgactaggcttctggccgtttgtctcgttgtttcgtgcctgggttagtaatttggtggatcggcagaccacaagtgcctatgacttgtcattaaatctatgtcgatacaacatgtgcgaacgcgtccaaattgagcatctcaccggactacagcttcttgaccccactttcctcggtcatcttccttacgaccgcctcccccctcgcacccccgacgtaatctcttccatgtcgccttttgccactgacgggcggtgcttcatcctcggctccctttggtcggatgtacatcggtaggatatcgtaaacgctcttcaacccgcgtggcggttcggtcccaaacgccgcggccgggtaagtcttcaacaacttgtcgacgttccactcggaaggtccgggagtttgttccttgttatcgttccggagctgcttgacctggtccctagtcaatttgagcacctcggggaggggcaacttttcgaggaaccacgcttggatcatcccaatccagaaggggatggggagaagtagtcttcgattcgtcaggtcggtataccggagggtgagctgcatgagttgtttatacgtaaagactaatgaaagcccggcagatcattcatcagccaaatatgcgctccgctatttccagggaggtctgatcatgacgcgcggtgcttaccatcaggtccacctccttgtacgatcttcccttcgagatcgtccatcaacgccttgccgccgtcacacgtctcgtccctagtagccacttcgacagccttggcgagatcaccgacgtagatcggttggaacttgctcgtccctcctccgaagagggggaggagcgggaggtagtttgctagggttgcgaagcgctagagacgaacaggatgagattgtagcgtcagtgacagaacgaatgaagctggtcatacaaacgcctcggaggggaagagcgtaagggagtactcacgctaaagaaactgtcacccggaccaaagacaagcgaaggacggattatagtggacgtaggatgatgcgtcttgaacgaattttccatctcgagcttggtctcggcgctatacatccgagggaaatgccaaatagataagtgttttgtagttgaacgacaaggcccagtgcttcctcccttatagaggcgcaaggggaattcggactcactaaggtgtgcccccattctcgattcccagagcactaacgacgacgaccctcttcacccctgcctccttggcagcccttgcgacgttctctccaccctcggcttggatccttttgaattcttccggagttcccgtgaggatccctacgagggagacgatcgcgctcgctccttcaaaagcagcggggagggtctctgggcgggtggtatccagcgagacgggcgggaggatggatgaaccgagggagcggagtttattgtagactatttccgacgtgtgggcagtgagatgaaagtacggtgagcttggtacaggttcgattctaggactcggtccagaatgcggaggacgggtcgtgagatactgacgaggttctggattacgggaagcgaggacgacttggttcctcgggtccgctacgagcgccttggcgatgtatgatcctgcaatgcatcgtgaaacacgcaatatgagtttggatatacgactccgacccgtcatagtgatttccttaccgacgaaacccgcgccgacgaggacgatcttgcgtttccccttgacgggttgttgcgatgcccaaggagaggtcgcgtacgttcgagaagttgtagatagggctctcgccgctagtcggctggtcgacgttgctgaagacaagctatacatggtgtaaagagatgcttaccgatcagtttgaggggaagcggtagtgctcaagaccggttagctcaacatctgttgttactttctaacggtcgaccctatccgatcgatcaccgaccgactgcaactagcatgctaccaaccacacgattacgtcatttcgagtcaaaccatcgacgatcatctcgtaatcggaagtatctcggtgacggcagctcggatgtaaaatgacgagagataatgccggcaacatctacgatcttagcgcgcgctatggatcgaccgatcgatcgagccaaacccaccgacatcatcatcttcatcaacctcgtcctgacgtcagccaggtcagcactatatagagctaccagctcgatacagcaagtccaattaccacctttttcttcctcgagattcaatagccatctttatcatccaaaccacttgatctttttccaccgcccactaaaccagcaaacaatctattaccatggacgctgccaagaacgccgccgccgctgccggagcttcgattcgagaggcaagtcctcctctctttcctagctcctcctcgatttctcgttccccgactaatcccaatcgcctctttctttttcacccttcgatataggatggagccatcggttctcaattccgatcagatggcgctctcggatccgttggtcagtccatcggaggcccgttcgacaaggagggtgctatcggtaaacgtgagtccgggtctcccccccctgttttcctcttagtgggaggttcatcgacgctgacctcgcgatgcccctctcgatgaaacttccattcccacgcgtagagttcactacggacggagctatcggaggtgctgcccagatcgcaggggagaacatctcgggaggtaagccatccccccttccctccggaccatgctcggtccgaccctccctttcctcgtcctctttccaccatacgatccatctcgcgatataaatgactttgggtgattgtgctgatccactaaatactcatcatagctgccgggtctgcgactagcaacccccagacttcagaggctaaccgggcggataggttgcctaccgagtagatccggtctttgggatcgattgaacgattgactggtcgaacacacctcgtcggatgtacaactagtaatgaaataatggaaacaatagtgtagaagagcggaaacggatgttcatccctcatccccccattcgagcgattcgcgaagggtcttctgcctgtcgtagcaaggtgcatgataatcacttcttgatcctggaacctccggggactatcagacgttgtagttccccggcgaaatcaaagcttttcaagcagtctcgcggatgggtccatcgctttcgtagcttgggatgttaccggtgccctgatcttacagaggtcccgcgtctggcctagtaaacatggtcaacagaatgaacgaccgctaacggtggcccggtggtcgaccactcattctctgatcgaggccgatatggatggaatcctcaccttaagtcgatgtcgaccggatccgttcgatttctccgggtcagtcgttgcagagcgcaagggttcgacggtcaaaaacgctctgggttaatggaatcatcctccctgcccttttctgatcggattcgcgcatgctgccatcggtcttgagtgaagaccatataaggtcccgcatcatgggaggaactgccggactcggcgatgaaacccgcttcccgcttcaaggggtgtctgttgacaaacaaacaggaggacgggatgatcattctgttcaaacatttcaacatcgtttgagagtccttgcagttgaaattcaagggactttaggtaaaatcactcaggcatttatttcaggccatcgagaatgaagtggtaatacgaattgatcagagccgaaaatggtagacagcttgataaaagtggacacggctttctcgacaagctttgggatgggggtgtaattccatcggtaatgacagctgagcatacgccagatatttgaggcgttcttcccgcgctttgccccgctggctattcagcgaggtaccgcaagcttggcatcggtcctcgaaaatcctttttgggcgtacttctgtatttcagtataatcaatgtccataacactcaacttacttctcaacccctcgcagtatacctgttcgcccgctttcatggcgacggggagaccgccaagcgatcaaggggaggattcgaggaccgtggagcaaagaggctgacgaagcacaattactgccgtcccacgtcgactcgcgagagtatcgggggtatagacaactatcgcgcctcgtaggcgatgcacaatcttatggccatgatacgcttgatgatcatgacaacgcagcctgatgacgataatgacaacactgctaggctcctggtcaagtagcgttgccaactcctggcacttaggagaaccacccgccaccctttcctcccccgctcaaaccttcgttaatggtcttatgtaccgacatgatatctgcgaaaaggagcatcatcagcaagtcttcttggacggctgggccagaggcgatgcgacatacaatcagtataactcagcgcgtcgttgttcgagtcctccatgagcatgttggcgaattcgacttcggtgccgtccatgttttgacgggcaatgatcacgggaagctcgtgattgatcaggcgagcgtgatgagcgaggatgtttcgaacctgtgtcgacagataggtaggtagccttggcaacgaggtctgcgggacaatgtcatgatcagtatgtaccctcttaggagttcaaccgtgtggacacgcacgattctggtatcaatctcgtccaaattctccacgccatacagatcgttaaggatttgtggtgagacggcggccccgagccaaaggaacgcgatctctccgttggctgcgatgcaggcatacatgtcaacctcgtgaacattgaagcagaaggccatgtcatcgcgttctcactcaagatgtacgccccgtctgctgtcatccacccatggctgcaccgaatatacgttgggagttccagtcggccatttgggccggcataaccaaccttttccggcaggtcatgcaccgcgaacattcgcgggtacaggaacgctgccgttgccggcagagacattgatcgcagagtccgaagatatagtgctctcacatccgatgcaacgtgaccgcctgtaagccatatggataagcagtctgtcggtcacttgggagtcacatgtgatcctacctttcaaagctttgcacttcagcatacaaagcgtgaatagcggcaagagcttgaaaacttcaggcaggatgagctatggcaaaatttgaacggctgttaagcgagaatttcggatgcgagggtagtcttggcaatatccctcacctgaccggagttttggccagctgcacaatgttttcgataagcgtgcagaatcgacgcgcacctctcggtcaatcctctccggacatccggcaggttcttcgacagtgcttgggtcacggctggaggcgcagtcctgttcagcttattgtgcaaggccacctgaggccatgttcgaaacctaccctctttgagtagcagcaccacgctcgtgtcaaagtctgcaaatctgaagacgttgccaatgtgatttgtcacgggcaggttcaagttgagcactcgaacgcgtcgttcgcctcctgcgctcgtgtacagaaccgcgacttggacatatgacacctgtttgtcctccagcttgttgtcgtatttgagggtggcagcgaaagactggaaggtatctagcgttccgaattcgagatccgtcaaagatcgctgatagtaatttccggtatacgaggatatgcggaggtctgaaagccgggtcaggggttagcttcaacagtctgctatggagcagggcgtatcgcttactgttcgaacatcggaccctcaaggccgtgttatatacaacctcttgaccgatcactcggcggagttcctcgtgcactgcttctcgatcacgcccaggatcgaatcgcggatggaagtatatgttgcctgcggtcacgctcgcaagtatccctttgtagcgattgccatcagtcaacactgacgacacgatgctgggacttccagttccgactcaccgaccgaaccgacatcgataaacctctcggggaacagccacagattgcaaccgatcccggcttccgccaactgatccgccgtattgcgccagaacccgtcggctggcgagaacaacagtttttccttgtccgtcccgtacatcaatgggtcttctcgcggtttcaacgttcctgggccgtagttcggtaatgaggacaagaacaaggacgcttgacctccgcatcctccctacgttatgctagtgtcagctacgatcatctacagggacgacgacgctggggctcacaagtccagacaatagcgccttgacgacggcgccgagcgcgacctcgctacatggcgtctcggcatacatccgagggatcagatctaacaagccttcgacttgtttcctagtatcgcaaaaagccatcagcacccttgtatcgcagcgctcgtaacctctcgactaaccgtgattgtacgggatcgaccaagaatccccgatgcagtggtacaaacatatcctcgagatctggcacgatcatcatctgcgcagtctcaagctcgggctgtagcacgtccatggtctcagcacggacgtcgagagcgtaaaccaacgtcaagacgcgcgactgaccgagaggttgtagaaatgcaccgcccggtcgaacgtgacgatccctatccggccttccgggaccctccacgaatcctcctctggcgtctcgctctcgtcctgtccaagcgtgctctccttgtccttcccatacagggcctccttgatcccctgacaaacctcccggacgaccccacctttgacggcgctccacgagacgtcgatcgcgaacaccctggcgatcggggcgggtctcctcatattctcgtcgtccacctttttcttgttgccctgtttccccgaagacggacccgagggggtgttgctccccgtcccgctcgaggataccccgagcgcgtccttggcgcccgaggcctctgcggcggtgttgacggcgtcatttaaagaggccaggaggtctccgctgacggtggataatccgttagattcgagcaacgagctcgggttgttcgcccagtatgctcgagggacggggtagtccacagtcccgtgtgtcaattcgggtcgggattggatatccagtcggttcccatacgagtccaagtgagacatgtaatggctcggtactgtgtcccgctggaggatgagcctgtgcttacctttgggcgatacgaagctatctaccgactcacctgtattacccgtattacacaggttacacatccacttgacccccccatccacccacttgcaccagggattcacgtaccccctgcacttggtacacctcggcggtccaccggcgttggggtcattctccagctccccttcttgtcgagcgacgtccatgaacgtcgtcacataggggataggttcttcgtcatatctcggggtcgcaaaggggttgatcacgaggccgagagggagctgtgacgtgtccaggagggaggcggtcgttgggatctgggtgagggacgaacggatgtatctaggtaaagaattacctgtctcggttcagggtggtatggtcagaacatgagcatcaacagcgagcctcccgaagatgtcggtcgttctggctgaccttgatcgacaccacggtagtcggtcgatgccaacgggatgacccctctcgtgttacagctctggaaatcctcgatatccgacaagttctgatccatctcggccacctctattgggctaggaacctgagtcggatcgattctaggtttagggcccttgatggatggaccggccgcatgcgggggtggtggaatatggttgacggggggtaaaggggaatgagtcgccgaccggttgatctcgccaggctgtagttgatctccggcaggtacgaaaggctgagcagccggcgccaggtcatcatcccagacccgtgtttttctctcgttggtagcgtaggcattttggtgctcggcgatggcaggttgggcttgcaaggtctgtccataaccttgctggtcgtggtgttgagttgggtatggctggaatgggtcggtagccggttgaccttgtacggtcgggtcgacggcgtaacgacgtctgttcgacatggtcaattgtgtgactgactagcggtagtgattacctctcagatacagctgcggtacaaccgatcaacgattcgcaaggagatgaagtatagagattcactactaccacactacttagttgtacctgtacttccacctcgggttgctgctcggtcgcgggagtttctgacgcggcaatgatcaagtttcctaggatgccaaggttgcagctgacagatacatggtcatggtcatggtcatcgacctcgttagtctcgctacagatcgttgttcttgccctactacaatcacggtagttccccaggactggacatactggctgctctgtaccctgcttgaggccagatcgactgcgccagatcgaaatggcatcttgtcaaccggcatcgttgaccaaacatctacccctcattcaccatccgttacctcgacaatgcctacctgcaggagcggaacaagacgaatccatccttcgtctcaaacagatctcttcatccaactccgattctcgaaatgacaccgacagtagtcaggagaaaggtgcgggttctacaggcactacgggaacaacgctttggctcggaggacagttgatgagctgctacatggccgagacgtcacctgcgggttcggctctggaatcgggtcgacggcggcacaaacgagtgctcgaactgggcggcgggataggtttcctttcgtgagcctgctcttctccctctagaccacgcttcagctcgctgatctgcaaccatctgggcttcccagattttcttgccgatgtgtgacagcctcgtcttggcctcgctaggatacgccgtgacgacgaccgacatctctccttcattcgaaaccgtcctctgtcccaacatcgagaccaacactcggaatcgctcatcggaatggggacccatccgatgccgcaaactagattggttcgcccataccgggtctgaagagcagggcattaccgtagctcgatcatggatgacgcacgaagatcctgacccggacgattcgacgctggattacgattatatcattaccaccgatacgctctactcgaccccgctcaccatcccgcttctccagaccctgcgatcattctcgctcgcatgcgtgacacctccccccatcctcgtcgcactggagacaagggatccgatgctcatcgcctctgcactggaagcagctaaagccatgggtttctctctcaagaagatcgcggcggggcgggtggagaaggctttggggaagagcggatggggctgggaggataagagcgaatgggaggggatagaaatctggaagtggaagtataccggtttggcttgaatggaggtgagcgtcgatcgcaagttacattcgggtcagcgctgatatattctcaagtcattcaggacgaacgacccgattgtcaatcaggttaaaaattcttttgacgagatggcaagctcaggaaccgcgagaaaatccatcaccacatggcataggggtcgataatgattatcacatgcttgcgtttcctttcactcgagggtgattcctatcttttcggctacaaatgctgcattcaaactcgttcttagttcttccgcttacgaacaggtggtacatccgttgacactgcatgacggtaccacacgatgtcagccacaaagatcgcttgaaagagacaaacgagcgaactcactcggtggcggtaaaggtcaccttgttggtgctaccttgtccgagctgacctccagcgatgatggcgatatctttggcgttgaaaccgacatccaagtacctagtgtacgcggcaggcgcgttggtattgagcacggtccaaggtccctctccgttctttcggttgatgtacaactcggcgttgctagcggcggagacgacgatggtcccgttggcgcctccgaccgaggtccagatgttgcttggggagcctttagggacgtaaccgctggtggtcttgatgggtcgaccctgaacgctgtcgaaagccaaggggtccttggagatcttgaaatagacggggaactggtagtcgctgtaatcggggccgccaccgtactcgtaggtcatcatgtacgatccagtggggagcttgtgcacgataggcattccaggtcgggcggtgtaggtagggtacctgacatcgttgacgacgggaccccaggtcttgccatcggaggtgacttgatggaccatcttctgaccataggccgggtctcgctgagaaaagtagcaatcaggtcggcttcggctcgacctggtaggcactgagagaaggtccgcttacctggtcactgtagtaacagacgagttgaccgttgtacatcataaggtaaggctcccaaacaggagtttcaccattgttggggagctgatatcacagagttgctcatcagcctcgcggaaacatggggcacgatccactcgaaggacttacagcaactccgccattggcgatgtgagacacgaaagtccaagtcagactaagcaagaccacatcgatgctatcagtaaatcgcaactgcaagccgccatatttgacctcagctcaccccctgtccttgctggcgtagaggtcgagctgcgtcttgctcaaatccttgggaatagagtttccagcgatcaaaatcgttcccttggggaatccggcaaagtcgacctcgagctcgtacaggtgaggctggtacctcataccccacccattgacggtgtcttgaacccgtgagatttctttccaggtgaacccgtggtcagtggatcggtagatggggaagtagggcttgtcaggggtgtagttctcccaagtagcaaggaggacgcccttgtcctgtcaaaccgatgcggatggtcagcgaaaagtagtacgctaacatgaagcgcgcgctgtactgacggcagtttgggtcttgagcataagctgacgaccgtacaatgtcctctcgttcgtgtatgttgaaggtggagtgtagatcgtgactggaccaaagtcccgcttggccagaggcgaagcgagacaagggaagcccattagcagggcggcagatatgagactgaagagcttcattgttacgcggtgcgctttgtgttctggagtcaagcttcgacgacgcacatcgccatctgcaaatcgatctgctcgtctgtctataagtacggtctcagaagatcaagcacgatacccggaccatccacgtcgcagacatctcggtcgaaatacggaccatacccctcttttcagcgcgaccgatcagaggtcagacagggccccgctggagagtaaacttcaggcgactgaacgcaagcgggggagccatatgctatttgaacgctagtgctgatgtcgagaccgaatatcctccaccagtcgctgccaaaatgcagaggcgttccgcgctaaggcgatcactttttgatgccgccgatctgctgccgttgctcgtcatgccccgacattatcctggtccacataagagcgctagacacgcatcgaacgcttgacccgatgtgctatttccaacgctcaatgtcaaaacaagcacgagaacattacgatatcgtcctgaaactgtccgacatggattcgcaagctttcaactgccagaattcggcctatgcgaaagtaagcgaacgttattgcaaaagccatggaccccgcttgatcaagtgatgggacctgtgaagatctcggagcgaatcgcacgagtcgcatatccagatctcgtcccgcgaacctaccgacggatgtgagggatcgctcggcagggttgggatttgaatcatcgcctgggaaatggtgccagcaggcaccccacgggcaacttggccgaacaacgaaatagaccgtcagattgcaaacatcgcttttgatcttaccccaagttcagccccctggagatgggacttattaacgtcagaagacaacatgagctgtcgtccggggcaaaaggatctttcagacgtagcatcaaggaggactgctctcgaagaacgagtggacgacgtggcggagttgcgagacaacgaggctgatcgctcggaagccttagtctcacaataacgcatcttcgggtcagagggatatttgggaactcatgctcgtgatatgagcgaattcagagaccaaaaggtttttgcggccgggaatggaatgccccaatcgagcttgccgagaacgccgaccggtaatctcagctggccgtcgttgctgcgcgatgcggccagcgacacgaaacgcaggaaccgtaggggctaccgtttgattctccagttgagcttcttgatgcctactgccgacatcggcacagttgcctctcgataatacgaatgtgaaaatggagctactcaatacgtcatactcttcactcatttcgggtcatcaaaggagtcgatcggctgtgaaggcataaatgcagtcggatttcggtgacaatgtgaactacgcttccatcgtatttcgatccgtacttcacaatttcctgggccaagatgaacgatttctgcagcacgagcccaaagaaagctggagctatcgaagctcccccagacgacaccatcccgcctgtgagtagttcgatggagctttacacgcttggcacatcacggggagagccagcaggaccgtccgatcaggtgagattcctgggtccaagtgaggccttgtcgactttttaaacctcaaagcgctgactgaactcgagcaataggactcagcacagaccggacagactggtcctagcgattcgtcgcaagctgcattaccggacgctgaaaccaccagtgacgagaacgatgaagcggagctcccagaccctgaggaattggttggactgaaccgccgaaaggctgaagacatcgcattattcaagaaattccagcaaatacctcgatactacatcgacgtcgacgctcagactaaccaagaagtttctgacgccccaactgctcatcagaaggatttctgggtccacaggcggtcttgtgcagaacttttggatctttttacgaccacaaccatggtaggtcatgatagaggtccatccggaatgcctccatttacgagaaggagagggacctccaccttgcttaccgtgattaaagcactaccgccttggaacagctgcttttggcccgtactgattcatctgggcgtttcggacatttcgggcgctgaggaatacacgaacctattgatctgcctagagacctatggaactgaaaaggttattgaaaggatggcgccgacccgccgaaaggattcattcaacaacgatgccaaattacatatgcttggacacttcattgacggaatggaaactggtggtcctccaacaatgttcatctgacctaatcaggtctccgacttctttatacagaatagttgatgtgacacatgtggttggtgtatttccgattagaagatcacgaggcttgagaacctcatctgcacgatagacggccaaggttcagcaaagctgagcggcatctaagctttcatactccatccccttgtctctaggagatatgggccgttgtgccacgttcgaaaaccagatgaatgtagaggccgatatcccgaaggtcagaagccttaatgtcttcgttttcaagttcaagggcaacaaatttgcccccacgatatacccaatgttacaccttggcgaaattcgccagaacctcagcggggcagttacattgtaggctatcgcaactctaaactaaggtcatcgaatttaagtatttcgaataaatctgagctattctgaaatacggtgtaagccacggtttcaattgtaaagtcatgaatccgttcgcgatgccgctcgcctttcgacgtatctcggctttacaggcaggtaaacaagccgcttctattgcatgagctatcccccacgtacgtgggatgaacgttcattcgaagtggttgcgatcgcggcagtccaaagaaaatccagtcagtggttgtccgaaaaggacaagaggagcgcctcaaggcgtatcttctgtgttggtcagttctgtcgcgcaagaggagaaagcaagtccccctaagaatttggaatcgatagatgaacacagcagtcacgtacgaagatcgaaccgtgcgcaaacttcatcggcgatactaccgctcgccccttctatcgatatgaaccggaggaccaaccatgtactgggcctaggcgcgatgagcagactgctatgccttgcactaaggagccgggatgtataggaagagattgaagtatttcgtcagagctatgacgtgattccgtcctgaaacacagtactaaccccgttaattaagtcgatcgacaaaggatacaagccagggtttctggtcaagtatagcatccatatatacgtacccgtatatccttacgacgatttcggcgggagatccctctcgattgaccacttcgccactcatacgcggctaaaacttgggtgcaaatatgtctaacgtatcgatcggattcacagagccctcctacgggacggataccacagtaaatactaatcagatatcatatcgtttatcctgctaaacatattccgcttaactgaacaaccagcatctgaccggtgaaatctcgctcattgatacctccatcgcaaactcttcgaccccctcaactagacagagccaagttccaagttctcgtatatcgaatgggatttcacaatttcccgcttcggttggccaagcgtcgggcaaagacctattgaagtgactgaaggaggagaatgcgagagcgaagagataaccgcgctttaccgataggaggaaaatctagacggatgattgggatcgggtctagacagacgcggtggaccgtgtgatagagccggtgaaggaggcattcaaatacgcgactcttagagaggtcaagaagtgtccgagcccgggagccttttttggacgatgcttcgctacatagtctcctcgacttcgcggagttacggtggctatgtgacgttcgataaagatggcgtacgtacgggtaacaacgttttgtggggacagaatttgctcctgcagcaaccggctgagaatccttcaatctccttggggactctactcgccttctggggagaagtcgtgagattggaacattccaggcgtaaaatctgccagtgatacgaatcggatcaggctcatcattcatggatttggattcaagtggacgcttctataggccttaatggtccttgtatcagtctttctctgttcgattgcactcggagatcattaatttcgagttcccccgccttcaagccactggagagttgcgcaccataacgacgcgtcgtctcaattggcggcgaacccagtcgctctttaattctaatcgcccaacaaaggagtgcattcattcgtcatctcatggctacaggtacgaatcccgaacccctttccccttcatgtatgccctatccctgaaatcgccgaaggactgagtactgccttcaaccagtcaatcatcatgccagatatgtcccagatttcggtcgacatggtcgatcctcagctgcaggtatgtaagtcatcatcatctcgtcctatgcatcaactcgatcagcatctttgaggctcatcagagtgacacggactcgaccagaccctctttgatatgcgatgggtgtggcggcgttgtgtcgagacatcgtgtaggctgtggtacggataattccacgaactcgatccggacagatcgaacggactcacctaccgcgaatagccgaccttcgcctctatcattcgaggctactggtcatttggtgtccgctctgaacgcgggggctagggattaggctatgcagctgcagggacacgggttcttttcggcaaggagggtcatcagagataatgcagcatttggcaaattctggtgacgtggatttccgaggatcgtatctcctgggtataccgaaagcagattatcctcaggcggaccatccgtgttgggccatgttgaggcatctcctggtccttggtatagcgcggaagggctgatacattactgttcagaggcagcggagacgatcgcgaatggctgggtggacgaatcaaacttcgcaatgtaataacctgtgatacactggctatattgttccggatgatcgcctagacgaaacgaggtccggctagcttgagcgatgcggaaggcggcgagagcggactcccgcaacaccgctgtcgtggtcgcccacctcgagaattcgaattgcacttgtctcgggacgtgtgttccactatgtttcaccgattagtgaaatgtgcagcgtgcaataccaagaagagttcatgagccgagttcgaaccgtccaagctatatgacagccttggttgtacgggccttcccaggtgaaacgcaacgtctcggtgtatttccggtgtatttcggtccaaattcccccgaaacccggttctcggggtaataatcggtaaagagcgaagacgagaccgagctgggtggaacggtgggaccctcctcgcccgcattttgaatatacacactctctcacaaagtctatcgagtctcgtcgaggaaaacaaaagtcctcattagtgaatccttccatctttctttctctatacggttgatcacccttcccacatccacatcgattcatcccaattcatttacgcgaagatgtccctctctggcaagaccgacaaccccagctttgtccttcgaggcattcacgacaccgtgtacgaggacgtgagtaatcatctcagtaatcgcttttcgtaccccactcgagctgagtaaaagctgtattacagaggcctatccctgagctcggacccaaagacgtcttgatcgaggtcaagaagaccggtatctgtaaatatatgacgtgacgtggtacattcggcttggaagctgacgtgagacctctatttgactacaggtggaagtgatgtccactgtatgtttacgcccgagacatttcgatcgatgcagcatattagattctgtgactgataatgttccggctctttctgaaaagacctctgtcatggccgaatcggcgactttgttttggacaaggtaagctcccccatattcgcctgtactctgatgcatcgctgatgacagctttcctcttcgcagcccatgtgcctcgggcatgagtccgctggttacgttcactctggttggtgccaaatgtcttcagtagcgatctggacgaagttgacctcgcttcgtgacccgatttgatcacgcagtcggctccgaggtgaccacccacaagaagggtgacgctgtagcgctcgagcctggtgcgacctgtatgcgatgcgagtactgcaagggtggcaagtacaacgtgagtccacgtcgtcccccgctgcatatcacgcccaggccccctcaaacattccgcatcttttgtctagctctgcccggacgtcatcttcgccgctacccctcccttcactttgggaacactctgccgttactacaagctcccccacgagctggtctacacgctccctgacacgtgtagtttggaggacggagccatgatcgagcccctggctgtgggtattcattcggtcgccaagctcggcaagttccagactgggcagaacattgtcgtcttcggtgccgggcccgtaggtttgctttgtatggccgtagccaaggctttgggagccaagaggatcatcgctgtcggtgagtcgagatcatccggtagaatgcggggtcagacaggtggaagaggctgattgaggatgatcttacatggtagacatcaacgctgagcgattggactttgccaaatcttacgtcgcgaccgacatcttccagcccgtgagtaaaaagcctgaccggctcggtaaagcactgcatgtccagttgctgaccttgaccttgacatctaaatcccgctcgcatcagccccctcccaaccccaacgaggcccgacccgacttttcaaagcgagctgcggacgccatgatgagcgagctcaagatcgagactcgtggatgggacgctatcgacctcgtcatcgaggcgaccggtgccgagccatgcgtgcagatgggtttgcacttggtcaagcctgcgtgagttggtagtgatcccgacgcccccgatatacgcggggaattggcgactgatttttgaatatgtttcgcgtttttagcggaacctttgtgcaggtcggtatgggcgcacccaacttggtcatccccatgtaccttgtcgccggaaaagaattgggcgtctttggttccttccggtaagcaagcattctcagacgtacgtggaaattacacgggtgactgagtttgattgtcccaatcgcacagatacggacccggagactaccctatggccatctcgctcgtcgctcgagggttgatcgacctcaagcctttggttacccatcgattcaagtttgaagaggccgtcaaggcgttcggcgtcacccaggccggaaaggatgaggatggcaaggtgagttcgcgccggaaaaagatcatttcgagaggttgacagctgacgactttatacttgcagtcggccatcaagtgcatcatcgatggacccgagtaaatcggcatgttgatatggaatatcgactgaggggtgtagtgcgatcgtatgcatacagatcgtgctctgtaattgtagtgcaggagcgtcgtggtaatgaaaatagcatagttgtggtcattcgctccatcaccttcacagtgtgacttgcagtagaaccttccgggaacaatacatgacctcgcctatctgcttgcgctatcgatgtcgaccacagtcaattctggcctcacacgaagccagccatcgacgggaaatatctacgtgctgcctctggccgtcaccgcaagcggcttgccacgacaatcttcgttacttctctcacatgcctcttcggcttgcgcgagccagaatgactgacatgcaacgtgtaacatcgacatgactgacctccccagtagtcaagcccgatgtggagcactttctaggcggtcatgaatgtctttccactcagtcttttgctctatactcctcaactgaccgctgctcgtggcgcacacatcatcaaccgctcttcgtctcagtctgagcactcgtctctgttctcgagtcgtcgacaaggaaaaggccgaaggaaaagcacgcaattccgaaacattgcggtcacacgtatcgcctagagagcctcgcatgtacgatatgcgaacggctatttgcaccactagtgccccgagaaggtcgtgaacatttaaggagacctgggtgaaactcacgacgagctcataatcgtaactttacatcaccgcttcgcagtcatacggcagagctcgattgaggaccgtcgtaccagacgttttgcaacgatgcgtcatgtctcattttccggcatatttgggcgcggcatatgcgatacattctcgatcttgaccttgggcgacccgcgtgagtgtatccacctcaaacggcactctgccttacgcctgccactcggtcgaccatctgagagacgcagttcgatcagctcatcgcacgggcgattacaagtgaaattggcgcttacacctcggatgtaagggagagagaggaaagtgccaacaaagggcagttgacgcaggaagttcaagatgacggggaagaaatctctgtggcgcacaaggagtatcacgttcagtcgggtagacttccctgaccggcactctcgttaaacactgacccgaaaagacccatgaatccgacagcttctacgacaactccgatgatggggtatttcaggaagaccaaggccctagggtacaatcgattcgtcagcatcgtgaccaattcggtcggtggggtcgactctgtgagctcacactccaccaaagaagcagatggttcctcggagtttctgtttccggctgaaaaagtagaatgtctttgtaggtccaataatcaagggtagaccggcgatgaacaggatctgtcgatcattggtagcaaatgcggtcagcttgtgctgagcggtcagtcgacatagtcatctcacgtttccgagtgccagtagcgcgccatcaaagaagagcatgacccctatgatgatgagagtaagaatcagcgtcgaatacatgacggctggacttgcattgtactcaccgaggaacatgaagaacatgccaaaggccacgagggcaatcccgatttctgttggcggtcgtttgcatcagctaggccggatagcgacaatctcacgatcatgcagaactaactctgtgcatctgtgagccacatcttggtattatatatcgttatcaagtacctgtacaagcatgggcgctttgtgaacaggttcaatcgagcttgacatatgctcagttaacggctgagcaggaacttacgggtgacgtccggcgctgaggaccagattatgcgttttccaaagtaaaggatgacgtatttatgcgtttttgataggtcattttgggaaatccctcgacaacggtcaatcagcaagcagagaagatgtatcgatgagatctgaaagcagaccacaacagccatggattcatcagtcaagcaactttgaacctcttatccttgatttaaagtaccatgtcagctgccgccggatcctcgaccaagcccgtcactgttgtctactgcaacgtctgctcattgcccgccgagtattgcgagttcgggagcagtatttccaagtgcaagacctggttggaggagcaggacccgcaattgtttgccaagctctacggagagggtgagtcccggagcttcactgtgatacgatcggtcggctgagtcgacccctacctctatcgtccgcccagatgccatcaaggagaagatcggcacgctctcgctgagcgctcaagaaaagctagaggccgaggctgacaaggcagagagaaaggccgagaagaaggcagaatcggaaaagaagaagaaggccgtcagtaaaagctcccttgcgattgtcttactatccgacactgacttgcttttgctcgcacatcaatcaaatcttctcatataggccgccaaggttaccatcaaacgagaagcccgaaccaagcgaaagacattgacatgtatccataaccttgaagccttcgggatcgacctgaaaaaagccgccaagttcttcgctcagcgtttcgctacggggtcgagcgtcagcaagaatccgcagggacaggatgagattgtgatccagggggatgtttgggaggaagttgtgagtccttttgtggagctcgacggtgctttctctagcagacctgctaggtcaaggatggaatagccgcgtcgaacgaatctgaatcaagtctgtcttggctaacatacgtttgtcctgcacgcccatagcgagacctgctgatagaacaagccgggcccctcaagggagtaccctcggaccagatcgtcaaggtaagcttctttcaatatcgaatggcttattttctacgcatgctgattgatgttccggtcggatgacaggctgaggacaagaagaagaagtcggaagaatgagttgtgccggcagtatttgacaccatgcatcaaggggacggcattcgggtgaaagcaggaaatgaatcgctccatgaataccaagcaataagcttgaatcctgcctttcagaggcccccaactagacgtccacaatctatcatagctaggaactgtttatggaactgcattctttacagccccaactctgcgtgcagcaagcatggtcctgtatgcaagtgggccgcgaccgccctttgcgatcatgtcgtcaacgtatcgtgacccgccaaagcgtcatgatagcgggtcatgcagtatctgatttctgagccgtcgactgagcgttagcaaagtcggacagaagcccctagctctgtgcgcatcgctgtgggcgcgtttcagcaccgctgtaacactgagcgttgccgatggttctttcgcttggtcgtcagatgaggtaatgaccgacaagaaccgttgacgcgccgggatgaacaatgatgattactatcggtggcctgtcgccctgaagatgccattcctttccctgggtcgtcgcgtccgcttctcaggcccgtgaaaccggatgtttggcagtcaatcgttcgtacaagtaagctcccattcacgtgcaatatggaagcggcgcattccatgccaagaattaaaggaagcaaggggatatcagagacctgggcgacacttcttccgatattgcgaacgaatgtctttctcagaagtcggagagccgcccattctttcctttgatgcgccttcaagtctccgctcaaagtagaggacggtttctcattcccacaagcaatattgaggcgctttgaccgaagtgaccacatttcatgagtcgctaggatcaacaagaaccgtaaaatgttgcggggatatgaaagcgctggtcaatttgacagagttcacggtacgcttccttcagacggagcacgaacttatcctccaggtttggcctcgcttcgtaacaaggacgccgtgctttctgggagctgacagcttcagactctgactcaagtcgacagccttcagggacctgcgcatcgatggtttgatcctgtcgcagttcgaaccacgatgtcgcacttgctttaaagacgcaatcgaaatagcctagtttcggtaacatcccaatcccaatataacgaaccggagagcgttcctcgaggcgcctttctggcggacgagcctcagccaaacaaccttaacatctggaccgacaagaccgacgttgtttggccggatatcgggcaaggcacctaaagtagtgttattgttcatggcagcacacatttggcactcaatgtcttggtcagagcgggtatacccttggcctcctcctccagctcgtctacctcggtgtcaccgaattggtgattggctaaaggtgtgctgctggaacactctacagtggactatggcgaggtcagtctggcgtgttatatagctcaacgccaggcctgagcggcctcgcgtcgagtcggttaccgtcgcctgagctgacgacgtctcagactctgctcgattaattctttgaatcacaagctccggcctgcccagtgcagcatttggtcgctgcgggagtcagaagaggaccagtttgcgtaacgaattggttgctgagttcaccaggtatctatctttcggccctcgcgatttcattcgtctgcgagcttcttgcgttggcttcactccgcgccgtactgaaacgcctctgctcaacgtccatttcgccaagccttgttttcagggggcccggcagggtggtggagctttgattcgtcggtgccataccaaaccacaggatccgcccgactcggagtcacagacggacggcggtgtcggtgaaagaggtccgatcccccacacagcaaagttgttcggttcataagtcgcttgaatactcgtcgaatcgtaacgccgctgaaatgtatttttgcctctttgggatgaatttgccgcatgacccccgcatgacgaatcgcgctagtgtccccttatgccgacatccgtgtgacccacccccgactggggccccttagcgcccgtacctttgtcgattcaacatttatcgacctactatatgcccgttattttcagggaaagcatgggaccatttcgaggaccggtccggggcggatcatgtcgaggcaagatctagcatctctcgatcgactcgacgggctatataaactactgagcaacgggaagatgctcgacaacaaaggtgcaggaagtatggtcttccgcaactcaagatgtggtcgctcactcccgctcgagcggcttcgatactctttcagcttgcgctttgcaaggttcacttcgcagaagctaacaacgatggcaaaagctctaatagcgataacatctgtgtagagacagatggatccggatcgggcttcttgctcgcttcgcctggcgcctcgacagtcatctacacggaccccgcctctcccgctaccatccattatgcagcggctgcattcgcgcacgacctgggatgcgtcgtcaaggactccaagatcaccgtcaccaatgtctcctcgatcgataacctaggctcgtgggcctcggatgggtccaatttggtgttcttcggtgctctcgacagcggtagcttgatcagccaagtggtcaatgctacttcgatcgatgtcagtgccacccgagatcaatgggagagctggaccatccaacaaggacagttatctcaagcgggaggtaaagacgttgccatcattgccggagccgacagggtaagtctttagtgacatcgaaaaaattctcatatcttgctgacagctttttgcagcgaggagcagcttatgcagcttacacgctgtccgaagagagcggagtttcgccatggtactggtatgtcccgagatactgagataagcaggcctccgcctgactctctttgctctgcttgtctgcaatcatgttacatcacaggtgggccgatgtcccgatcgtcacgcactcctccttgcgactcaagaactcggggacctgcaaccatgcctccccggtagtccagtacagaggaatcttcctcaacgacgaacaaccttctcttacacagtgggccaacaagcaattcaactctggaccaaatgacccccttggacaaagctttttgccggccatgtatgaaaagatgttcgagttgatcttgcgattgaaggggaacatgatctggcctgccatggtgagtcgatcatgccttccagaatacgccttctatatcttactgatagagagaggtgcgatcttttacagtgggcagacatgttccctgtggctggactcgatggtctgccaaacaacgggacgagcggggttggcgccgcgggtcccaaccagcttcttgccgatgcgatgggcgtgatcgtgagcgcctaaacaccctttcgccagttcttcctgcgctcatcactagtctcttgcagtacgggacctcgcatcaagagcctatggccaggaacactcctgaatggactaaatacggaaaaggcgaatggaactacactgtcaatcaagaattcctcgacggcttctggacttacggcgccgagcgggccaagggattggaaacattggtcaccgtgggaatgcgtggagatggtgatcttcctctacctggagccagcatcgagcgattgaaaaagattatcgacgaccagcgttccatcatttcgagcgcaaacgatggcatcgctgcggaaaaggttccacaggtgtttgccctgtacaaggtatgtactttcggtttacacctctaattttgaagtgcaatctcacaacttctcatcacctatccccgcgcaccaggaagtcgcgcaatactgggaacagggtctagagattcccgaggacgtaaccctcctttggtctgacgacaactgggggaacattcgtcgcgtagccctagcaaatgagactgagcgaagcggaggcgcggctcagtattaccacttggattatgttggagacccccgaagctacaagtaagtaccgggggcgcaagtcaatttggacagttgctgacttcagcatcgttgatcgcctcttttcctgccctctaggtggatctcgacggtctcatacatcaaaatgtgggaacaactcaacacggctcagaacatgggaacttcaaagatgcttatgttgaacgtaggcgacctcaaacctatcgaagtcggagcaactctcggtttggctctggcttatgaaggaaccaagtctcttgctcctaccaacggtaccgtcacgggtgtctcggactgggttcgcaaatgggcaaggcgtaccttcccaaccttacctgccgacaaggtcgctcatgttgtcgaggggtacagcgctctcaatgccaggatcaagccggaacttgtcaactcgacgagctggagtttgattcaattcgacgaggcagaacgggtggaggctgagtggcaaatcatcgtcgacatggtcaacgatatgaagacccaagtcaacgaggaactctaccccgctttctatcagctcgttgcctaccctgcccttgcctccgccaacttgaatcaactctacttagctgtcggccggtccaacctccatgcgagtcaggccaggacctctgccaacttgtggacggacaaagcgcacgaatgctttgcccgagatgaggagctatccgctggctaccaccaattgctcgactacaagtgggatggcatgatgagtcagacacatgtaagtctgatgcttgcgtcacaagctgctatgtaccctctgacgggtcacatttcgaaactctttgcacagatcggatatcagtactggcagcagcccatgcgaaaccaaatcaaccctggtcccgcctcgctccaacgagactactggcccgtgcagagtcttggacctatgcgtatcacgaagcctgaacttaggggagcttggcctggtgacaatggtaacaactgtgcactgggatacaactgccccggccctacccttaccggactcagccgatacagcacccgacctcagtgggtggatgttagtagcggagggtggatcgacttcgagtataccgccacggccaacgtatcctggatcagcttgtcctccgaagggggctcaatcgcgggagacggaagtaccgacgctcgggtccacgtctcgatcgattggacccaagtacctgccaacgctagtgacaccgtgtatggcgggatcatgttcgcgtccaaaccgaacgaccgacctcaaacggtagtcaatgtcacagtcgtcgctgataccagggaagtcaacacgtcttcagctcgacctggtgcattcattggagaagctagctacgtcgcgatgcatgccactaatgcgaccatgaagaacaacgtcgacggagcggaatgggttgagctgccttactacggattgactggaaacgctctggtcgacttgccccccacccaccccttctatgcggctggagaaggaccatctttggaattcgacttttactcctggggcaacagcaaagagaccctcaacgttaccgccttcttcggcccgttcgagaactaccacgcaggcaacccgttccagtatgccctcagcttggatggtagcgagccgactattgtgcaaccgattcctctcgccaagaatgcgggagcagaacctcccgactggaatcaagtagtcgcctccagcatgaggaagagcatgacgacattcaatggaacggagtacgcctctgcaggctggcacactcttaaggtttggaatatgatcccaggaatggtcctggaagaggtggtcgttggtggagactaccctttgaccagcctcccgcctcctcaaagctgtcgcctataaagagatcaagccaaaagcaaagaatattgtagaaacccaacagattacttgtcataatgataccatgatgcccatcgcactgaaactgaacgatgcctcgcagcttgtagtcctttgagctgcgtcggtcggaaagatccgatgtactagtcttgctgctcccgtgccggcaacaagatgcggatgtggcgatgggcaagactatgtatcctcgtcatcattggcgctttaccggtgaacacgaacggcgtatgtccgtgaggggaagcgcagaagtgcattaagacagggtccgagctacagtactacactttggatcggaagacggcccctcgatcgagcactggctcttggaatgtcagggtttgatcgatagtactggtacgggatcgatcagtaagccttgatcccgttgcttgcccactcgcaaggatgcccgcctcgtcagggtgggggttcgtcggtaactccataggggcttgtggtagcttgagagcggccctagaggcggtcgaccgcgttttggttatcgtcaacgtgtgatggaaacccttgccgacggggatcgtgattccatgaatgaggaccgatgtcagaaccaggaagaggacaacgggctcaatgacggccctcagctgagttcgttcctctgggatgttttcgagcgcaacctgaatgtagaagacggccgacacgccgatacagccgaagaatcctgtaaaagcgccttcgccatatcccttcaacgctggcatcaaacgagtctgatgaaacgcggacgagggtcagttcgcgatagcgagacgcgtaagctcggctgtcttacgagtgcggtgacccaaggtgggcgtcgaagagcgatgatagagattcccagtaatatcaagcgccaggtgtaaattccaaagtaacgatcgaactgcgaccaaggcaagatcgtcccactgtgatgtccgctttgaatcagttcaggcaggagcatagctttcagagcggacttacatgtagatgaacaccgacgagttaagaagcaggtcgatcacgtcttgtacagcatgctcttcggtttcgactcggaacctatagccaaactgtaagcaaggcatcgaacgcgccggactttcgatctcttgactgaccaatcgtcccaactgaagctgttgccaagaatgaagcaggctgaatttgatcggacatggtcaaacaatcagcgatcagttatcctgtacaatattgcacaaaatcaaagcggaagctcaccaagaatatcatccgttcccatgagtccacacacgccgagagtgaagaacgccgccgccattccgaatgcgaggaatgagtcgtggtcgacgagctgcttctgctctgcccatcgtaaagctttgcggaagatgctacgtgaggatgtattcaacgatcagaccttcacaagacttggtacagaatcggcataatccctcactatcccagcagggtcccaatgacgacagcgagtaagacctgatagatgagcgtctcgtagatcctgcgaaaaatgagtgatatagcgaagcggaacgcagtctgattacgttcagagcacacataccagtgaccgattgcccaacctagactgtccgggtacccctctgtatgcctcctgatgaggaacaaaccaatgaataggaaaggatatctgtgataagacgagacttgatcgatatatagacgaaggaatcgcttccgagaaagatctattgcaatcttacccaagccctgatattaagcaggatattgtcagttcaatccgacctggtcaagcctgaagctaacttaccatcgtttgctcccctgatacgatccaaacatgaataaaggtcagctcattctagataggccgctgagaaaacaaggactgacgattcggcaacttgcaagatcgattgtatggcccgatcagctcggtaacatcatcgcatcgagtcgcccgagacttactgatcaaattcctgacatttgctggcacgtgtttttcagcgaacctgcccttgcagatagcgttcgccaagaccggatctgttggagtgatgcacgaagcaatgactagggactccagctacagatacataccagtctcagcttgacattgatggtaggtctcacagaatgggagcacttacgtaggtcagatttggaattaagccccaaatgagcaggccactaacgaaccagcccgacagcattgccggtcctagtaaagtagccagggatttccactccttcttcaagtaggcttttggcaagtcgattccagcaaacaacacctggatacctatgatgatccgggtgactatggcgacaggtcccgtatcagcgaaaaagagcaaaagtgctctagtcggtttctcgactcactctgcagagtgaggtaacgatatcgttcctcttcatagtccacccattcgtgcgggttgacccaattcagagcgacaggtccgatggctataccgagtccaactgctaagattgactcggctaagaagggaaagtaccgagcatagctatgacttcagtttgcagtcgaaagccaggggacaggccagcatggcttacagatgaacagcctgttcttgacgaggtaagaaaccaggccgacgacgatgatgtacaggctatactcgttgaaagagtaagacttcagcccacaattgtcgtatctctgaatccgagcggctcacccgaggatggcaagcactttcgatatgtcagtcacatcaacaaaatggggcatcttgtgaacttgtaaagtgagggggcgagaggctacagctggctagctgtcgagttcgtgttattgttccaagcaggggcagccgtagaagcgagtgactacggaagtgatgcttgacgaatttgtctcaacaatgctcatggggtcccacggtaagactcgatgcaataggtccgcctctttcctgctcgaagatcttgtcgagacttcggtagatgtcctgcggcacgacaaccagctgagattttggtaactagtcagagtccttgaaaggtagctttggagtatcgacgaaactattgtctgatgtctgaacagtagtgagaggtagacgtgggtgtggggcgaagcggcgtcggatcaatttcttccgtcctcagaaagttgatcgacgagatatgatgatggtcatcgaggattaaatctatttttagatacatctcatccggtgacctcggaagcattcaccagctgcaacaaacgtctcaagcggatgtcgcatcttccgctcgattccggctgtcatctgtctgtgatttaggtcgctctgaagtagctggacccttatctggcaggtggacctccctcatccccatacaggccaacagagccgccacggacagtcctacctgtacccaaaagaccgcgtgcaaggcttgcgagtaggcgtcaacggcgagatcgcgtgtggcagggtcgaggtcggcgattgacgaggtcgaatgccgtatccgagtgatgatctgataggtatatacagaggtccattagccggaaatctgtgatagcaatgccacggacgaactgacctcgctagcgtcaggacccttgagcgtccgcgccaattgcttggtcaacaccgactgagcgaccgagctggtgatgccaactccaatgacctgtcccgtagtcctgaacatatatgagactggatccgagtcacgcgatcagtccactcgtctatgctttggcggagatgacggcttggacctactaccggtagcgacagccatatcttccgtcttcacagacccgatcaaagcgatcaaggtactggtgatgactcctgaaacgccgaacccgttgggcacgatcgcggtccataaaaaccactccggggtgtgtacggtgaattgggtcatcgcgagtgatgagatgacggcaaggagagccataaaccaggtcatccaccagtacttgcccgtcgatcgcatataagctccagctgcgacggaccccagagccaaggcaatctatgtccgagagtcacaagtcagaacatagctgtcgacgactacagtatatgcagacttacgctattgggcacaagatgagcccctgcaacagccgacgaagttagtttgaccgccgagaagaacaggggatagttgtagagctagagacgcatcgcaatcagtacttgattgtaagaatgccgccacatgataacttactgcactgaaggccgacgccgagaccaaaaaattgctaagagcgaccgcggcaggcgttcgttgactgctgagaagagtatcagacactgctgtatatctttcgggccgaccggatacgtacgttaccaatctcatgggcatgagtggtgccttcgcaacgaatttctcaacgagaacaaaggcgaccgcaaagaccccactgagcataagcaagacccaaactttaggatcactccatggtagttcggtatccgcacttgttttcaacgtcatgccgaccagcagacaagacaccgcgctgacaagcgtaatcgaacccaagaaatcgaccttggcgagcttctgtttgggagtctctccagtattcttgagagggatatgcaccttgagccagacaagggttgccgatatgataagaataggaatctggatgatgaaagcccacctccaaccgatgttactgctcaggaagccccctgtcgaaatagagtttcgctttagatagatgtttacaaggttcagacgtaaacacttaccgagagggcctccgagacctgctccgagtccaaagaagcaattggccattcctgagaacggcaatgacatccaatcagaatcggttgttttgcgaggtcgcgcaagccgtttcaacgcttaccttggtacaagccgcgacgtttccttcaggatgttcacagcggtaagtatcggccagaagttgccgtggccttcttagacttacaaagggactgtaaacgcatggttctcttcagctaggcgtcgatgcgagtttttgcttgacgtgaactcaccaacgtcagacactacgatactaccgatcgaggtcaagcctcctcctcccatgccggcaatcgctcgggcagcaatgagagcttccatggaaggagcgaagccgcatcctacggtcaaagctatcagatcatattgtaccggtataaacaacacacctcgacgtaccaatggtgccgatgcctatagacagtatcgttgcagacttagtattgattgccataatcaacctggaactgccttaccgaaaaaggtaatcgcaatcatcatactaccgcggcgtccaataatatcacataatcttccatagatcggtgtgaaagcgcttcgttatccccaaaggaccatcattgtagactggcataagctttgtgaatgggtgcggggtctacaaactcaccacacggtcaagaggtagctcgctcctagccagccgctcaaattgcttttatgaaagctgctaccaatgtccgtcaagagagtagcgactgcgaaacacgaagtcattcgatcagtttctggtttccgattcgcacatatcagtcgcattcaaggcataccgatcgtgccatccaggcttgcaagaatcgtgctgaaatttcaggagatgcgggctttcagcagcataccgtatatctcggcatcgtatcatctcacatggaccaaagaccagctaacatccatatgaagtctttcttactgatgtcgatgttgaaatccaacgtcttgtctttcccgtcttctggagctatcgtatcatagcttgcagaccgagaaggcgttcgagccgccagcaaaggcgttctatcggtggctccaggcattgggattctcctcctgagtgctacttggaaactgccgagaaattcctgacacgatgcgcatcagctgaagacgtcgacagctcagagactgatttgaagatcgatcggaattttcgatatgtcgtgatcccggtcgcaccgagcggtttcggagatcgccgaccccacaacgataccgatacgagatggctgagacgaccacgagtttcttgcttcatggaatctcaagagcatcaagaagcctattccgctgcatactaatgttacatctagagaccgacttaggggggggggggggaaacactgtgtactggtttcaaattaagttgacggcgtggtctcgttgtcgtgaggggaaaaggaagtcgcacgatctactccaaaactcgctcagtggcctccctctgaacgcggttggcactgctggcctcagaagcacgcctgatggcccaggtgagcctgttcacgcgatagtctgatcaataaggttgttcttccagtcattccgatgcgaggcactcactcgtaagtcttggtggcatcctcgaaggaggagagaatgtgagggtcgggaccaccttcgatacagtcgacgaagttcgagacctcgctgaagaaggctgaaagagttcaacaacaaggagtaagtcactgtcacaaagtctttcggttaagcgggacgcaaacttacgatcgtcgtcggagtactgtgaaagtggcgaattgaaacagattcgcaaattagcagatgacctcagccttgacgattcccatcacttacggcgtggcgctcctcaatgtcgtcaccaggtcgtcgcaagtacagaacgggcgcgttgtaggggtcgacaagcctcatctggaaaccgtcacagataacctccaactcgcacgagtaggcggtaccctgcaaggcgacggcgtggacgaagctaccgatagcaccgttcttgtacttcctgtagaaacaaagtaaaacctgcgtcagagtcaagctcgatctggacgctacgctgaagctcggcttaccaggtagcgctggtcatcctggggatcctcaactcttcggggatcttgctctcatcaacggggacccggctaagctgaccgggtgcctcgtcccactcaacagagtgagcctgaaccgaggtgatatcgacatctccaccgaagtatcgagaaaggtctgcaaagcgacaagatgtcgtctgtcaacaaacggcggggtttcaacgggtctggatgtacttaccacagaagtgagtgcctgagacaattcaacgatgccccgctgaaggtcagcaaccgtccattccatatccgtagctgatttactcaccctgctcgataacgggacccatgtcgatggccttgttccaccaagcgggcttggcaatggcctcgtaagcacaagcctaaggtcgggggcacgattcaatcagctggtttgccttgaacttgtagcaccgagctagactcacgtatcgagcgatggtacccatgacggtcaagttgttggtagcgatgatctgcttcatcttttggacgcatcgcaggtaacgaagcatgtatctgttggaccgaagcggaaatcagtatggacttgcgatgcgaaaccgcaagcaacactcacccgacggagatgatgttaccggactcgaccaaagcgttagtcagctccatggcctcgtgaactggaccgcatgaaacgggctgcgcgcgggagaatagagcaacgtcagaagacaatcggaaatggtggcagtaagtcagtattgcgttgactgaccttctcgatgaagtaggacgagttggggaagagcttaaggagcctgagctcaaggtctcggggaccttgaacaccgcctcggtatgcggggggagatccgacgacgatagcgctgcaaagtcaatcgactttagccaccagtacgctgatgaacctcgactcccgactcactgaggctccttgtccttgctcatggcgtctcggaagtcttcgatggtcttgtagacaatggtgtccctgtaggcggactctacgaaactggccctcttgccggccaagacagcctcggcacgctcgacggcggggtcgatcaaggcgacgaccttgagtcgaggaccaagcttatgttcgaatcggaacgagtggctagtaacgggaggttggtcaacgtcgttgatttgttgaccgctacgcctcgtctgatgtactcacttccaaggaccctcgtcactcccaaacatgatgttctatacggtccaaccaatcgattctgttagcgcgaaattcatcgattaaccgacagattgtcggttggactcactccggcaccgatcatggcgacattgaagtcggttccaggagcaggaggaggctggctgttgagttgaggagccatggcagacgacgcaatcagtcgagaggtgtttttcgagttggagtatagggaggtcattggagtcgcgcgaccgattgaagggagcaggccaagggaggtggatggtcggcatgggatgagtttggcggtcgcggacaggtgtcgcgaggagatggtgtgagagacggcattggttttgagcgattggattcgaggtagtcgagcgatggagaacatgatgggcggtgattgttgatatgcgaggggttgatgcgtttgtatttgtggagtgcgatgcgatgcaagaagcgttgtccaggcaggccgagtgatgtatgcaggtgaagaagaaagagcgagcaggttgcagtgatgtatgtcgtcgaacgatgtgcgtggtgatgtcacagattcaggggagtcaaaggaaagttggtttcgagtcgtcggggttttatatggatgggttcagtatcccgtgtgccggccaaaaatcacatgacgtgcacatcattcgttttttttttcgcggccggggcgccatggtgaccagtggacgcatgatgacggagcaggatgtgcgatcgatacggggtaacggggaagaacgatccaccatgtttgatgttgtcgatgaagattttagagttgagtggcccacgggaggatgaagagaggagaggtttcagatccgagacagtcggttcagaaggtgccccaaattgagtttcggtgccccgatgtgacggacagccagagccaaaggaaggggaaagcgtcgaccgatgatccaaagaggggtacaaggtggatcgacgcgaggatcccgcaagcgatcaggccaagcgtttcgtatgccggcggtatgaagagaagagggaggaagatgtaaacaacaaccaaacgtcagctgatctgtgctatagtcttcgtcgttgtcgtctcatgaacccgtaggcgcaagcgatgcgatggtcacgttcgctcgagccgagccgggcgatcgtgctcggtgccccccttcttccctttctctcctcttcggcatgaccccgcccatcgtaccgacccgaaactctaggaacgttcgactgcgagaaaagacgacgaaggatactcacagatccatcctgccggactgctcggggtgaatcccatcttcaggagggtcgttcaagcctccgtccgacctgacagaggtttccgagatgaaccgcctggcgagcaacgaaccgctgacctggttggcggtcttgatgttgaaggccaaacccgagcggatcgaggacgatcggagggccgagttggagccggtcgcgatcccacgggactgggttcggacagcggttaagacgttgcggctcaacgcctgacggctgaggttgttgataaagctcatattctgtgcagtttatagcgatgacagtgttgatgaaaagaacagtgggactggaccgggtggtcgagttgatgttacctggggttatataggtcggcgattcgtacgacggtcgtctcgattgtaccactaagagataatttcgtggccgaagctccaaaagattcaaaggatgatttgatcggctggcttttcttgatgggcggcctttttggaatctatcagggggtgactttcgagaacgtttgatcttcttttctctatggttcaaatctccgttgggtggttcaaaagctcaagcatgtctgatcgtccagagggaccgacatcctttggaaaactactgactggcccaccgattccctcgaatcccacccctctccgcgtcatgtcggggtttcggacgcgagagcagaacgtggcatgacgtggtatacgtcgctactcagcgcggctcgggcctgtgcgcgtgccgccggcaccgcctccgcatcaccgatctttcagggcgacgttggcagagctagcgcgggagaaccatagtgtgggctatacagcggacgaccacgattgttatcaactcgtctacagcacccaaactcgatcttttgcgtatcccaattctcccaagatccctccaagcggcgcatcctttctacggagtgtgatagggtaatctcttccgactagcgaatctgccatcctgcgtgattttacgtatgggtgttagcccgaattgcgcttgccgaaacccaatgctctgcgctcacgttttgggcaaacacatcatagcgcctcgagtaggattcaccttgctgacttgttcagctggcgaagaggcttctgcagtaggcgatgtgccgttccacaagctggaccaccaggatgacttgtcctcggactcgatagttttgctcaactcttgtgtgccatctgacttggcgagcaagatactgttccaatcgaccggaatcgttgcaccgacattcgccctgtatcgcttgaatcgtacccgaggtcccgctccaagcttagacgctataggttcgatgccatcgaccacgtctccgacgctggcctttcggagagccgggaagaattgggcgacttctgctaaatcaagatcaccgtctctgggttcacactggtagagattgaacaccggtgttgatccttttgaggccgctaccgatgtcgacccggagacttcttgtcttgatccaagcttgttgagcaattgcatgaacggagcgatacctgttcccgtcgaaatctgatcatgagaggggcaacgtctcgcatgagggaccccaactgatgttccgaattatgatacagtgcttaccaaatcgacctctgatagtccttgcaatgggattctacttgtcattatcggtccccgaagctcgatctcgtcgcctgcttccatggagtgaatatacctaattcgataatgacgcgcaaaatcagtctcccgcagattctgtactcccgtgctaaacttacctaccaacttccccgcctctgactcgttttacaacgaattccatatacccatcccgagcgggatcgttgatcggggtgtaaggcctctcgatctgaagatccggcgactttacgcagacgtgctggatcgtcacagcttcgagatcctgctcgtcgacactgaacatggctctcgattcgtcgttcagatctatccgtaagagaagatgctggggaccgagcctctcgaccgaccgaacggtatgtcgggtgtattggtaaggcgataagtccgggttggaaccctctctccgtagggactccggcaaaagcatgtagagagacggtaacagggagaatgatagtagaacccgatagtccgatttatctcggccttcacggctgtttcgagactgatgtgaccgggacgactgattcgatcgctgacgctgggcgacggtcgagctcctcgatcggcatccgacgttccggttgatgctgctcgcttcaaggactgaagcccgggtgattggcagtgcctttctcagaatggtgccgttctgcatgatggatggatgacgcttatggcagcttgtacaaatggacacgacagctgttccgaaagcaactccagctatgtcttgtttgtctgaacgatcgaaatcgaggacgaggtaggtagggcgtcaccgtttgttgattttgtcaagctgtcgcggtggatataagacgattctcctccagatcgttctgggtggaattaggctcgcacgtgaactaggttataaccggtagttcaaaggtattcaaccttttgaaatggctaactcaagaccatagatcctcagcgagagatggtctcttggtacacacagcaacgcccgcagccatgccggagactaccgattcggctgctgaagaagcactccccgcgtcagtcccggcggaggacgatgagcgggcattgcgtgtctctcagctcgatgcggacgagctcgacaccggtcttgttcagatgttggcgggcaagatcactcaggcattagcggccttctcagtgagtcattcgtagagcttgaaattcgatctccatatctgaattgatccttatatcttggcggttgtctgtctagccatcggccgagtcgaagtatactccagaaatcacgctgctgctcaaactgctgctctatagcttggccattagaggccggaaagcgagagccactcctggccaaaagttacaaaacctcaaatataccaacaagcctagtcctttgatccgtaagtcagcgcgctgcgaatcaatagtcaaacccatcttaaacggtgtgatcggtgttctcgatccggtcataggcctcgtcaacccttacattgcgctccccctcctctccaccgttccgtcatacctcctcgaacgagctcattctcatactttgaacgcgcgatatccggaatacccacgggggacgttacaacgccgatggtggatcacgttggaacggttcaagtcgctgggaaaggggatcgaattgatcggctttctcctctttctggtggatggcaagtgagtccctcacaaacacagttggagtgatgtgacgattaccggggagctgagctttgagtctcgataatatcgtaggtatccggacttgccagggagatttagtggggtcaggatgatcccggatcaacctttggggtctataacgaggcagatcagctacgagttcatgaaccgacaattggtctggtccggcttcaccgtacgtcaaatgatcacgtctgacctgcagtgttgtccatcgctcacgagcgacattatcgtcgtacgaatacaggagttcctgatattcatgctaccactgcttcggggtcattctaaatcgctaggagctttcgctcagggatttagcagcagtttacggggtacgatcgccttcttgacagcgaaacaccaagagaccaagtacgaacccatccccctacaaggcggtcccccgaatgcgaatggcacgcttggtcgaaattccggtcgacggagacgggaacgcccgagagggccttattggactttgcatcggaactcttgtgcgatctgtcatcatcgtttaagggataccatcgatgcgcagttaggtctccccgcaattcagccgacaggggatgtggcagcgatcggcaagttgacgggcgaagatgtcgacgcggaacaacagacagaggaagagaacgaggagacaaggattcatgttccggcacagacggattgcgaggaagagtgcaggtattgttatttctgcatctctgaagcgttgacgctgcaggccaagactgtagccgatggggagaagcgccgacagggaagcgagacgctgcacaaggagggtcaggtcccggaccggacgataaaaggctgggactgtctacgctgcggtggagaggtttggagttgtattcgagtgacgacatgagatagacaagggtataccatactataccataccacaccaattcgagcctggatatgcgcgtcgccctttgagctctgtcgattccgcgctcgctgctgtgttacccatccgacggcgaccgacgaaggggggccaggcagcgtgtgctgtcgtcataccacccacccacacagacccgtctggccgacggggacatgggcatcgtcgtatacatcgtgtcgtatcctttgacacctgccccttccaactcgcaaaagtaacgatatcatatccaagctgctgagattccctttggaaaggcaatcattcaacaaatcttagtaaaacatgtcgatatctattcctagcgacgctcaattggcgtacaccactgtcgtcaagggcgatcccaaggtcgaatgggccatcttgtcagtcgagatgctatctactgaagaagcggccttccatgggctatataaggccactgctaacgcccgtgatgttcttacgctccagttcccttgcctcggctggaagcgagttgaaattgcaatccaccggctcaggcctcgatgacctgcaagaagagttcatggatgggcggtatgttccgcggctgcgtgtctgcacccatgtcaatgcatctgttgaccaatcccaatgattgcggcattgcagtatccaatatgctttcgctcgagtagaggatcccaacgtgagcgattggagcgatagctgtcatacggtgtcatactaacgtgccgattttcctctgctccatcagaccaacttggagaggttcatccagatcaactggtgtggagacggtgtagccgcgtttcagaaaggtctcttcagtacgtgtgttttagatcctacgagcccgtatcaccacgctgaacgagacccgatttagacacctactcgcctcagatttctgggttcttgaaagccacgcacatcgtcttacaagctcgaaatgaagatgacgtgactcccgatcacatctacaagcgcatgcaagagagtagcggttccaagtacggtgctggaaactcttcgacggcctcgcctgccgtgtctgccagcaagcccgctcccacgtcggctcccaagccatatattcccagctccagctcgacttcgaccttcaacaagcctactcctggaccgtcctacgaccggcctacaggagcgttcaacaagcccacaccatcgtttaacaagcccaccccggctcctgcagcggaagagccccctgcgccgcctcccagagagccttcccctccaccccccgcacctgcggtaactccctcagctcctgctgcaaccccagctgctcctaaaccagctgatgacgaccgtatcgcgcctgtcggtacggcttacgaacccgtcaagctcgccgctcccaaaaagctcgtcaaccgatggggtcaaggtgctttcaacaacagcaacgacgacgaagacaaggcggacgagaagcccaaggtcggagggttcaacgccgccaggaacgctttcaccggtggtgctgcggcttcgaacaacacctcgtcgagcttttcttcgggtcctaccccaggcaagaagttgacttggagtgagaggcaggccgaagccaagaaacagcgagaggcggaagaacaagctgcgacagaaggtatgttcgagacgagcgggagcgtcgttgttcagcaatatctgatactgcatgtatatccatagccatgggcaaggtctccatctcggccaacaacactggctccaagggctttggacatggcgctccggcttcttcggctcctccagccgcaccccctgctcccgcacctgctgccgaggaacaggaggaggaagaggacgtacccccgccacctcctcctccccccgcgcctttgccgcctaggcaaccagagcccgaggtggagagtaaagcggagaacgatgacgactgggacgatgcgcctcctgcgcccccacctcctccacctatggcttccaggcccgtcgtccccgttgaagaggacgaagatgatgtgagtcttacatgctgtcaagggatgtcatgatcgttgaccccgcatctgcatgaccggaacggggtgcatgagcagcgtgctgggtagggtgcatgttgaggttgaggtgggcggggtaagacattggtatcgaatgatctcctgagattaggcgttcgtgagagggaggactggtagacttgggtttcgttacgaagaggtcggggtcgtcgagcgtagcgttttgttgcagtaggtggtggtggtggtagcggtgatagtcaaggtgatcgattgaggtcgattgaaaagttgcccagatcaggatagagatacggaagtaaagctcggcttggttatttctctctgattctcctcgtggactagttccgaccgacgggatggcggtcagacttgagttgtcgatgatcgcgtggtagtatgtggtcgtgaaaagaagatacgtatgcagaagacgatgtcaggtctgggactataggtgattggttgcggcagtgtcgttcttggccgcagtgattggtgaatagccgaggacgaatgcgagtgtaattaaaatggttggtagtgatgatgtttgaatcgtctgggagcaagtcgtggtcgattgtttagcctctgaggagtgcagatgtggtggtggtgggtggtggtgatatgtagagatatgcaaaaggtgatggcgactttgtcgaatccagcaagggagagcgatcaaaggacgttccaggagaggaaaaggggactggagatgatggtgatggtgatggtggtgatgatgattgatcgagtcaacgaggcgggagagatgctaaatgtagaaacgcggtgatgatgttgacgaacgggggagagggaaaaagagacgacgacaagtggaaagatggtagagggatgaaagatgaaagaggaagaggatgaaaggtaaaagaagtcgagagcgcgcaagaggaggatgatgggggtcgagatcagagaagttgggatcaagtagaggtcgagcaacaaagtttattgttcccaaaggcagctccccccccctctgctcccccttccttgccggtaacaagacgagtctgagtcgatccgagcgagagaaggctccgagcagcaaatacgagctgagtgctcacggcgggagggggagcgggaatgatcacctcgctaagctctccgagtcacccgccacgcgttgggcacaatctcgcgtggtcgtcggcccagggccggcaggcgcacacgcgtcgtcgtaatagtttgggttgatcgtcaaacgggaaaaggcgtcatcacgttgggcattcgaacaggtcgagaggttcataccctcccgacaaaatgcatattccggtgaaaactcgacggtcttcaccttgcaagactacaatgaccacggaccgttccctatctctaccttctaagcgctctcgaccttgatctccatcccttcccccgcctcgccgctcccgtcgcctccaccgggcaagacggtctcgacggcgctctcgtccttgacaaactcgcgatcgacgagcgtcttttctcccttgtaattgttgaacccttcgttggcgatggacgaagcgagttgacggtcggcagggtggacgaaggtgcatcgggctggggggtcaaagggatcagaaacgaatccggatcagcaagactatctgtcgacggatcggtccgaatgctgtcgacatggcgtcaaagacttacggtcgaaacactttttaccaaacctgcatgccttaccatgctggaacctgcagttccccctcgtacacccctcaccgaaccgacagggcaccttgatctgcccgttcatcggtttgacgaccccaccggaagacgagcctagggtaccgtccatctttttcccagggacacccgcgatcggtcgactcgccatccccgcggcagaggaatccaggtcgagcgtgatatccagctcgtcatgctgactcgggtcggccatgtccacatcgatcgggccagaaaccgcggcggatcggctgagcgccggggtggggacgaggttccccgcagcgtcttcgtgacgaaaagagcaagccgggttgttgcacttgtttccaaacttgcatggcacgcggctctgacccgcagcatcccccaaagcttgagacgggctgacgtggctataaggacaatccttgtccgtgcatttcagaccttcagggcatgcgtccgtcttcaacaccatcccgctctccaaggtggccacagggctagggtggctgaatccacacgatcggttcgtgcatccgactccgtacttgcagatctcttgcgaggtgggacgggaaggaggggcgacaaacgtctttttcgaggggaacgaaccggcaggtgcggcggtctttgatgtcgacggattgttgacgagggtcgcaggtcttcggccagagatcgtatgcttgccaagctgctgagggggttgaccggatatggtcgttgtatacggttgttgcggtaccgtgccctatacgcgatgccgctgttgtcagcctaaaaaccgaatagaccgtgtgggatgaacgttccgagactcaccatctgctgagccatctgaaacatcatcgactgcatctgctccattgtagcctgattctgcctgaacatctcctgcatcatcgcttggtctggcccgttgggtccaaagttgaaaccgttctgcattcccatcatgcccatcataaacggatccatcatgggcatgccttgagggccaaagtctgggtaggcgacgagggataccggtgattcagcatgcattgaatgcgttccagcggagattcgaccagacgtcaacgtactgttcctgccacctgatcgacccggtccgaattcgggagcttgagggttgagaggaggtcctcccatacggtccaaaagcgacctcttcccgccacgacgtcgatcgccgtccatgtccatcccattctgtcgatgcgctcgaggagccgtgggtacgccgcccgaacccaaactccttcgtttgttgtacgcttcggacccgctctgctgttcgttgactggggaaaagcctcgtttcacaccggctacctgtccagacgggccggaaggagtcggtcggacgggttgcgagctaagaggggcgacggcgttggagaaaagtcgggcattggacggagccttcgaattgcgagaggatgaagcttcgtccatcgagatgtcggcctgaggaagcgtagcaactggggctggggtcgaagtcgagccggtgaacctggaaacaacctcttcggccttctcaaagatccacggcgtgaaagtggggtctacacgataaagacagatcaagtcggattagtcgtccactggctttcgaccgcagcttgctcaccaaaatcgattccttgcactacacatggtcgagcagcaggtcagcgaacgtcagagaagcgagaccctacagaggcaacgtacgatctgccaactcctcgttgatctgatccgacgttttgtgattgactgtgaggggaaaagaaagcatcattagtacaccgccctaagcgctgatgccttctcgctcaagactcactcaacatgacggtgatgtattccgccaatgtgttgtctgaaacattaaccaggcatctcactgagcatccaatcaccgacacctcctctaagccctgggctcacctccttgctcggccttgtcccgcctcatcaattcattttggatctccgactatcgtcaattgaaagcttagcgatgccgatcgatcccgaaaggcaggttgtgaagaggcgacctacctgcagagcagcggcttccgtagtaccagctccgatcgtaggagccatctttattataagtagtgtggtggtcgcggctgtgatctataacgcacaactcgttcaatatcctcactggcaggctctggaaatagtaagatcaaggatgaatccaaccggaatgatgttatgccttgcttgcccttgttgagctgacgactcgaccactagctgttgcacatcatcattcgaattcccctttcttatgatggcggacatgatatatagtctcatgtccgtttctccagagtctcctttgtgaccgttgtagtttctgaaacacatagacctcctcatatcgacggcacttcatcgtgagaagaaaccatcattataaggcggatgttggagagccttcttcacactgttgcccgaccagccacatcaaatgcacctctgtatcttcttcgcacccctttacagcttgcgcctgtgtgcgtgacttcttccgatcatttcgtttttgacatcattctatcacggtgatccatcctagccagcctatgaagagcttccatgaagccataatgcgttataaaatcgaagatgaccgtcctgaacagaaatatctctaaggatcaacatgcccaacatcgactgctggcgccctcgctgcaaactatttctctttcgttcgcccttccccagccgcccatccagggtaatgagcgatgagcatcgcttccttctctcgcgctctcttgctttgctcagcaaggttgaagactggtcagatacttcccgaatgagtccggccctgcgataacctggcttgacccaaaagctgactgaccttgaccgcaatacaaggcccaaagcggttctcccatcaacgtgtataccagcatgtgggtttgctccggccgactgggatctgtgccggtccagattccgtcgtggcaacaggtgtgaccgacgatgagcatgaccgtcgtcaagctcgttgtcaaggagacgagcgcctggttcatgcttcttttctccacaagcagcttgtcgtccaggatcccatcgacatcccccttatagcgtgccggctgctcagtcaggagacgggcagggacggcactaaaataggagatggcgatctgcaaggcgatgatcatgacaaactccttgtcgaacggtagccagacccggaagtgcggtagggagatacccattgctcgagcgatgccgagcgaaaccgcaacgatggcgatgttgaccgccgctatccctcgaaacatagtcgaaggaggcgtatgtggtggattgctgcagcggttgacatatatgatcaaagattgaacgggattgtggacaatttgtacgtgagagtaggcgtacaaatcctcgattatcggcgttgctgtcatcttatcacctagcgcgtgaggtaaagctcacggctgggtccaacacgctgcccgacacccgaccattaatcgtaggattggtgctttcggggctctactgggccaattcaaatcgatcagactgtaccttctcgactgattggtgctctattccttctacatccgctcatgggcactctcatggtcttgacagtgtccgggaccgcaggttgctaaggaggaggtaatcgtctgagttcgtaaggaaatgcgcctcgaacgccgagcaactgtgcgcagcggatgacgaccgggtttatcgatctcgctcaagaccacgtcctgctctctggttgcaaacctgcgatgatgcggggcttaaggaccaacaagaaactcgacgctatcgcactcatatcatctcggacagctggcaatcgtagcgcaatcaagattatatccaagtacaaccaacagaagatcaagcggaaaatacaccttcgacgtcaagtttcattcgtcggaaatatcgacgaatcgcaaaatcgtgccgttggcagcccggaccaatacgcccatgttttcgtactagtgatgcaaacagctttccatcagataccgctcagggagatgctattcgcgtccaactcacctcgatcaaagtctccatcaaagcagtctccgtaaagcccttggccagcacacggcttctgacgtcgaccatgttgagctcgtcgaggtcttgctcctcctcgctcgtctcatccgagacgcgcctgcctcgacgagcctttttggcagcccgcggcgccgtcgccatatccttgatgatcctgaagatcttgctcgcatcggtctgatcctcgccgttgttctgggtcatctggtgttcgtacagactcgacttgctgacttccatcagacgcagagcctcgtcgacatctccttgaccaacgacatcgtccatacgtaatcgtgcaagagcttgcgacaaacgcagcactccgagcaaggttctcgccgagacgtacgagttgaatttttcgtccgcctcttcctccttttgctgtttcctcatttgcacgtacgagttgacgatgtactcggacatggcaggagggacgatgggtcgaatctttcggcattcagcgatgtagtgcctacgaagggggaaaggtgaacgtgagcacatttgcctagagtgatggggccccctacgactcacctcataagcgtcggctcgatcggctcaaagtccaaagtaggatgagtgttgtgcatatggacataggtgacgtgatgagccaatcgctcatcgtcctctcgtgtgggcgtatcgagaatcaggaacaatacgtcgaaacgtgagagtaacgcggctggcaaattaatgttctcgaccggcgagatcttggggttatatcgtccgtaaagcgggttcgcagcggcaagaatcgaggtcctcgcgttgagggtggtcgtgattccggctttcgaaatggagattgtttgctgctccatgacctcgtgaatcgcggtcctgtcggactcctccatcttgtcgaattcatcgatgcagcaaataccgttatcggccaagacaagggcacctccctctggtagagcgatcaagaggtcagattccgatagccagagcagaagtactacctcgctggcgtgactcacccaataccatttcgtccgtgaccgggtctcgcataacagcggcggtaagaccgacacccgacgaacctttaccagtagtgtaaactccccgcggggcgatcttggtgatgtacttgagcaattgcgatttggccacacctgggtcacccatcaggcagatattgatatctcccctaatcttgacaccatccttgatgtccttcgtgacacctccgacgagcaagagcagcaacgccttttttacgtcttcgtgaccgtagatttctggagcgatcgagttggccaatcggctatagagctgttgatcggtttgcagatcccggatggcagcctcgatttcaggcgtcaattccatggccgagtattgtttcttgagctggtggatgttttgcgcttccaggtaagtatcctggagaagaccagctcgcatcgctcggaaaccggtgtagggggttggcaagaagattccgccgacgtggataacgtcacccgggttgactttgcgagtcaagcctccataaaggtggatggtcattgatcgggggatgtgtccaacagggacttgatcggcctggaaggaatatcagagtcagcctccaagggtctctcgatcggacgcgtggatcaagctcaccatctcctgaatcttgacctcttggaaaggcctgaatcgactagccctggtctgcatatgcaagttcccctgcgctccgttcctttgacatgtcgcactcggacacttttgtagaggcgtaaacgatttctgagcgatctcctggaagatttcgttgccgcacatgtcacacgtataggcgttgaccagcaagaggggcttgacttctgacactcgggtgacgattcctcgaacggtgatgagtttaccaagatgagctcctcgaaccgcccggacagccaaaaccgactggtttcgagggggcctgaagtaaaggttgctacagggtccagcgatcagcttggagtaccgattcactagccggtacaactcactatcgtcgaagcaactcgggagggaacaattgctcgcccatctccgcggcagcctcagccgcatcaccacccgcaccttcttcccgcatctcgttcatcctcctcctctgcgccatgatcacgtcgagcacatctggcatggcttcagattgcacatcgattgtaggagcggggagaaggctatcgatggcgctagcgaacaggttgatgtatcgacgagcgttgttgaggatgtgtccgaggaggggggactccgagtcgtactttaggtagaaaaaggcaatatcagaaacgttcgcacctaggctgcggggtcgagacatacacgctgaaggtcacccaagtcgatgacaatatcgttcagctgtcggttagcgactttggcctacgtttcgaagagaaagatcagcaccaatcgtaccaaaggcccaacaacctggcgacttacaaacatcctcatgtacttggctttcgttcttcgtgcaccatcctgcccttcaacgttcatgtcttcgagatcatcaagcagatcttcctcctccgattcagcatcctcgtcagcttcagcgtcatcatcccgaggaatcgcgttggcatgagcttgcggcttgacgtatttgctgagaaaggtggtgatggcagctatcggttgggacatgtcaggaagcgagttcgacgatgtatgattagacagagctcacctaactcttccgtgtagttgacctggcaagaagcgagttttattgggttagtagggaataatgtgccctgccatcgactcgactcaccccgatgttggcagtgggcaaagtggcctccatactgtcaagatgttctggatgttgttattttcgtcaaaacccgtcgcgagatcgtaactcgaccaatatagccgattctaaagaatttccgggaggagagatcaacgctctcagctgtctaagacctgatgtgttgtgagaggctcggaggagatagtgaagaggattctgccgtatgacatataccgggtgatcaagagaggattaggccagccctctctagcctttggcttcatttaggtcgcgtcgagggtgatccaaacgcggtctgaggcagaacggacatcagaaacgcagctatgtcccgcgatccggctgaaacgccaaacgcgatcattctcttgggatagcaaatcgatctcagggctttggtatgtatggtttctcagagcgagacatatctcagctcgatgtaagaatactctagaatgcgaattatctatcggtgactgatgtcgatatcacgaagttctgtatgcccaagaaacattcgctcgatggctgtcgagtcacatagaatactgtgccggatacctttacaaggaggatcatttaccatgacatgtcatcaaactgcgtccgagaacattcctgacatgacatcccacaaaatcagactgtctcgccttccacagcatcagtggggatgttgttcaatcgttgtcttcttgcagacttacgggtcatcctttcacaggttggcgctttagcagcgactgatcaggattgaacagcgcgtcgcaactcatatgaacgagcgcagtcttccacctagaactcatctcgtccacatacttcagatggaaagcttgcatcaaggcgtgccaaacctcaaatcctatcagccgtgcttaggcatcaaggctcttctcgtgttgaagagttctgaccatctcactttgcttgccgcttcggcccagttgcgctccgcatgctgcaaatgcttgtctctcggataggcttgcaacagagcgaaccaaaagtcaaggcccagtagatcgatcgcgtgtctcggtcaaccggcgggattgcccaaggtcaaacgagacaccacgtaatggcacagtcaaagatcgccagtatgcgctacgtagaccaaggcacgctcttgtagctcatggaaggaacccaggtcatccgcttgcatgatacgcaaaatttaaaaagtacgaacgtaaacggacacgttgtacctgccagccatcttggcaagctctgcggcttctgacgaccctgcaagtgtgcagaccttcgccctcagatgaagatggcatcaaagaatattgaagagaatctcgatgatcgatcgacggtcctgaagctggataacttccaactcctccgtgaactgttgaggtcgaggtgagccaagggcgtccttaaggacggagctgctcaacacttagtaagatctatgcagggtttccgatgtcaaatgagagctggctgacctaagttcgagaacatccttggggaacagcagaggcggatcctcatcctcgaaggctatcttgaccatgtcagatagagatggagtgattttgccttccgcggcgctgaatagctgttgagacatgggtcgacggatagcactgagcgatgggtctgatcaggaatgtcctggcatctttgctttctatacgataccatcttacgaacgttaggctcggctgctccatgtcccttccgagaagaacgggattcttcttgcttgctgtattattcgacaatgtccatgactcgacatcaaccgccctaacgcaatcaaaactcacactttcgtttcttggcaggctgttgaggcatgtctgcttgctttagattggcctccttatctgttctgaggatcgtttccacttcttctgaggaccgttttcactttggtggtgtccagcatctcgctggtgcagtcaactcgaggctcaattgcgaatcgaagagttgtctatgtataaatatggacactcatcaacgtgcatcaacttgttgctctttaagactccgagacttctccgtcgcggcgatcgcggccaagacgtccgtctactcttttgtgccccgaagcgaggaatcattgatccactctcggaccatggcagattgctcgtcaccccgggttttccagagaatcggcgatccttttgaatgatctgcggcagcgacactgcgttctttgttgtttattacgttaactattaccatttatcgaccctctttggatttgagaacaatggccagagcttcaggcggatcttgattcattattggtaatttcatattcatgaacaaagaacgaaaccttgctcatcttcaagctatcgtcgatccaccttgaactcgcttttactgcgaaacctttccgatcacgttatacctctgtgcatcgccccgcccgatcgagatccatcggatcagctcagcacttccgatgactgcgttgaaacaagagatagaagccgaacgcacctttgagaaaaagtcataccactggtccaggactttcatctcggcgggttcgagcttggtgtaatcgggaatagcgtcttcgggcttcaaagacgatttgcctgattgaccgtacgagcaccaaaacatccgagaatcagtcaaatagatctgaaaagagatgacggtggaaacagaatgaagagaattcccagcgagactcacccaacccgacactaccgtccttcccagcaaagatgttgtaactccctccaggtccatacatctcctttttcgcgctgacatcgaacacggtccccttgatggccaaccagatgggtttcgaagggtccgaaccgtcgtgctcggagagtttggaacgggggatgggttcgtccgagggaggagagagggtgttagaagggggggacatgatcgaggcggtctgcagaggataagggcagggtatgaggcagggtacgtcagatggacgaagactacctggcgggacaagcgggcggaggacctaggcagggggttgtaggcataccttttctacaccggccccaacggcggcattcttcaacccttcgaccgaattccctttctgctgctgttgatcggcaccacccatccttcgatgatccttctccttgatctcgtactgtttaggcaggtagacgaaaaagtaacacccgacgacgatcgagatgaaggtgacgacgagtccggtggtattctcgaaataggcgaggatgttgtaagggtcgttggtgcgtgacatgtaagggggtcgaagaggagggtgatatagctacagacgttgcggaaatgatgtatgcaagtaaggtcggaatcgggtcagttgtaggtttgttcccccaagctctggtctcccggccaaagggtgaagccggtatccgattcgatgcttacgtggatgaggcggttatactgtaatcacgtgatggactaggctgatgatgggtagatagacagctgattatacctcaacaaggctttcgataagatcaattcaagcacactggccaaatattcgactgatctatcacctcattccagatcgtgactctggatcatctgtgagaccctgtcgatcgagctttctcgagggcgacgacgacgacgccggcgcgtttggtaccgtcactgtcccaccccactgctaactgctgaccccccatcttccccgtaccgagttggccggatatagacatctccggcctcttctagcttttcgacaccttggtgatagcttcgacatgacctcaacctgagcgatagcagagtctatgctgcatgattcaccaccgttttcgtctcacgccataacgagcgatgaacaagtaagaatcgtttcaggcaaggaaaacgggcgggccgaggtgaaatctgcaagtcgaaaggggcctggagggggtccggagatggccgaccagcgaacgcagcaggatcgcgatcatattttttacagctctcgtagcaagcggccaagcggattgaaacttgatgtccattgactatccacggttccatatcgactgcgtctcagtagtagtatagcctggtcttaccctttcggactgaaccggtccgaaccttcatcgttcggaatgacctgcacgtgcacttgcctccctctccctccaccttccttgtatcaaaatacctctttcgctgtcgtcatcacacttgcgtaggaacatgatgaccttatctgctcccataaatacaacaacagtacaacagatatgcagagagataagcgattaccgattaccgtttcgcctcgatcatccttccctgtcttttcgatctaccctggtcatcctcacatcggagaaatcgattgtggaccgtctgcctagaataaacgtttcatatatcgcaaccgggttgatcacggacctgcacttgtgatccatacgcctgtccacactatcaacagcgatatctacgtcgtatcggtgtgatccctacttggaatggccaagtcacgcggtacaagaagaacctcgacatcgacaacgacgaacgaactggacttacatcattgatacggactccctccacctgtcgtcattgatagctaagagcgatcccacaccggcaacgttgcattcttcgccagccatttacctgcgtacaatcgatcagttctgaatcgaacgcaggcaggcgacggacgaaaagaaactcaaaggctcgtagaataccctttcgaagatgtgcgggatctgcgccatcatcactccgtacgacgtgaaactcgtcgatccctcctcgcccatccgtactcccgaattgagcccgaccactgatccgacctcgacctcaactggtgatcccacctctacccctagttccaactcggactctgataatgatctcgcgaacgacggaacgacgaccagggacagctctcacttgaacctgtacgccgcttctttcaagtacaaggacgccagaccgagactcgtcggttcggaacctccttatacggagatccagagaccgaggtccgtctcgcggtccagacccggatctgtcgttcctcgggcagatgaggaaggagcgcacgggctcggtctcgacgaggcgagtgaagggaacagcgtcaaggatggagacaagagggatcccggagaaaagtccgtctgggtggataccgcccgagctgaattagccgcgaaaaatggccaggaccctgctctttccagcatgtcgtccacaacagcagatgtcaatcatgctcagggttccaacgcttcgaccgagtataggacccggttggagaatgagctcctgtgtagcttagagactatcgctcatcggggacctgatggcaagggggtctgggtcggagaagactgcagggtggctctgggccatgtcaggcgagtggtcgcacgaggtttgttcgcgggatctgggctgatgagtatgcatgtgtaggttgtcgatcagagacctctcggtcgcggggaggcagcccatgcactctgatggtgaggatgtgcatattgttgtcaacggggagatttacatgtaagccaatagggacaaagctggttttgacaatagctcatttttcgtatgttactcataggtacgaggagctgaaggccaccttggagtcccgtggattcaccttccattctcattccgactcggagctcgtcctctacctgtacctcgagtacgggcaagactttttgcaacacctgcgaggagagttcagtttgatcgtgtatgacagcgcgaaacaggtcgtcatcgccgctagggatcgatacggtatcaaaccgttgttctggaccgtcactcccgagggcaggattctcatcggagccgagatgaaatcgtttctcggtctcggattggttcccgagtgggacgtcaagtgtctaagggattgcgggtggttatatgatacccggacgatcttgaagggggtcaacagattacgacccggtcacatgctcgtgatcgggatggatggcaagatggagtcgaagccgtactgggagccgtcttatccggacaagaacgtccccgatactagatctttcgaagaaatggtcgaaggggtccggtcgaggttgatagactcggtcgcttgtcgacttcgtgccgacgtgcctgtcggtgtctacctatccggtggtatcgactcgagtgtcgtagcgggtattattacgcacctcctcaagaatggcttgaccgctggtagtcaggattcgcgcaagctgaaatgtttcactatcgaattcgacgccggcgcacataacgaggtggctatcgccaaacggaccgccgatttcttgggcgtggatttcaaaccgatgcatgcgagcgaacaaatgctggtggacaactttgagcaggccgtctgggccatcgaacagcctgcgaatgacctgaactttgtgggcaagtacatgttgtcccaatttgttagtgggcaaggatatccggtcgtcttgaccggcgagggagccgatgagcatttcgcgtgagtcgacgctatcacacttcgacgtctttgcttcgcagttgacgtaaagtacggctgctcgcacatccagaggctattcgctgtttctggcagactacctgacggaagcggaccgcgctgcgcctcagatggcaatcagcgaacaggtcagagagcgacatctgactcgcgtgagagacatggcgcaggacgagcccggccgcaatgctttcgttcgcaaccccgtcgaattcgccggcaaagacaagatcctgcgctcgatcaaaaacctcgaatatcctcaaatccagtcgaacggaatcagcgatatgaaggttttcgctggttggaccgatacatacggccaagggaacccgatattgacgacggtcaatcagctggacggcgtcgtcagagccaagattcgggactcttggcaccctctccattcggcgttatacatgtctcttcgaccgatggatggaatcgttctgtcttctctcggagaccgttccgagatgggacactcgctcgagggcagacctccgttcctggatccagttgttaccgactatgtgaatcatctaccgccatcagccaagatcacgattgatgacaagggaatggtcaaggagaagagagtcttgagagaagccagccggcccttcatctcggacgaactatacaatcgaactaaacacccatactcagcacctgccaattatccgacgggcggtgctgtgcatgggctcatactcaaacacgtcacggtggaaaagctcgaggcgctgggttttgtcgacatcgattacgctaagcgcctgcttaaggaggcgttcgaagagggcggaatggctgctttcaggcaagttctgatgctggcacaatacacgatattgcaaacggctttcggcatcaagaccgctacagtccctgttgctttgtagactgttggaccactcggggagcagctttgtcgacaagcgtcgttcaggaccataatgaccgtttttggcacgctttttgtatctgatccgcagactgtatctatcgagaattatacacgacattgatgcccctcttcttccctcgtatcttgagcgagccatatgcatattgattgttaagatctcaaatgattttgttcctgttttagatcgctgactgacgcttcagcgatcctgctcggaaggttcttgggctcaatcaagctggaggtccagttcggctatgatagtctcggccccggtcatgacgtccacgcccaattcgccgctctgaatcgcaccgatcatgtcgggaacggtttcgaaaccccagcaggtgtatcgaggagcctccttccgaacgatgactagcgcatgtcgctcagctttgccagctcgacgaatatgtttcaggccgccccgtgatagcacgtataagtggactcgatccttaccaggcagatctagcatgcaactttcgaccctctgcgcaaggtgcacccgtagcactaccatcttcttgatgtcctgagcttcgaggtttcgaagagggattggtccattggcccctcgagcgatctctttcatcagctcgaactcctgacaattctcgccgtcttcatgacgatctttgtgacagagcgggcagtcggcggaggcaaatgttccgattcttggcatctgatcttgttgggcaactatctcggatcctgtctggggagactgatcattgatgacaacatatcccgtgctgtcggacttcagagatgagggaggttcttcagtcgtagagggctcgggccggctggtccatactgaggatatcttcgagatccacgacgttgcaagatacgtagcatcgcctgtgaacgacgcaggtggcatgatggaagtgcgggtacactttttttcttctcgaattgcagacggaatgaaagagcgcaccgagaacatcactgaatgaactgttgtttgacgactgcgaaccttatatcggccttgacgaagacaaagggaagcctcacgcccggcgcgatgagcaactccacatggatcacatcatctcattttggtatcacactccgaatattatcaaattccactatattgaacgatagacaacgccattattatgagcgatcccctcaattccgctcaggtgacactggatgacgctatgagtcagctacgaagggtgccttcgataggagttatacatgtagatacagtctgctcaggcgaagcgcgcgctcaaggacctatccataattcccagcagatcacttgccccaacccccttgttcgcatcggaattgctacccagagtactgcgctgttatttctatcgaaaaccgactgcgtacgatcaagaataaaagttcgagcgctgaaacgcagtcgaaactgcttcgcagcccggatcaccctacttctagagtattcttactcttactgcgcattccgatcgtctagggtagggatcatcgtcatcggatctcttgcttggcgagaaatgaacctcgtttcatcccaagatttcagtctcataccgcgttgtggttatgcccttgcgtcagacttcgagggaactcggagtttcgtctctttctagggacgtcgggctgtggatcggacgggacgggtgcgcttcttctcggccccgcccgcgaaatggcaaagatcggctgaaacggcatggatatcggctggaaacgagatcgacggccgattcgagggccgggaacgaaaaaggattaaacaagaatgtgcgagtgtgtatcggtttgctagacgacatggtccactgaaacgaggtggagattgataggcgaggcatcctgcgtgcagtagctgtggtcgacggaggggatcagtcgacatgatcaagtggccgatccgatcgatatagaaagaagaagaaaaagagggtacgatcgtaggcgaatgggcgcaccaaggtgttcgaacggtgtcgtgggaagagctttgagcatgatcggaatgggaccagcacctcgatgacgatgttcattcagtaatgccgctcgatcaattttcccgacatcgtcccccggtctgagatcgttcgttgtcctctgccgatgtgccgagatttgatgttccgtcggaagggaacaaggaaaagaaggaaaatgttccaagatgaaacgatgtgcagggcgagaggagcggcaagatggcgaggttgacgagggacgggtttgatttgattgccgggcgacgaccctacgcgcaggcggggaaaggagagataaacctcaaatttccgcttgggcctgagagcgagaggggggaaagcgcggatcgatgacgaaagccaaggggtgccgcacctgcgggcgcgtgcaaggcgggccgtgatgacgaccaagatgccgagcacagcatgcgcatccggccgagtttcgcgtgcgcgaaggtgtcgccttagcccttcgcctgtgctgccctcacgcttttcatttcccgaggtcaggcaaaggcccaggcagaaggaggatacctcacgttcctctctcgctaacctgtttgttcctcttgcctgctctgcctgcctcttgccctcgctcgtttgaaatccggcgctgggcagaagaatacagaaacaggcagacaagggcagacacagctagcaagttgcaggcaggtagctgcaggtagccaaggcggaaacgacgacgaggtcagacgtgccgcgatcatttcatcgaagcagaaacatcatccacccacctacctcgttcgataccagtctcgaattcttctcatccacttactactctctacctgtaccacctctcttggctccgtatcctactcccaccgagactgtaacaagacagagcactctgtatttgggaaaacaacttacgacgctcggctccaaatacgaaaagacgacactactggaccgatacccgtaatcgaccttggcacgcccccctttctctctcgcatcacgaaccatcgaccaaacaaaccatcatatcgattcgcctctcctccagagaatagccagattgtgctcgactctgtgacctctggttcgaggaacgggctcgatcctccattaaaacctgacccagaccctcttcgaaacatcttcggacctccctttgatggacgtcgcgaaccctgtacaatctctcgtcctcggctcgtcaccttcatcccccttcccgtcctcgtcaacggcgacaactcccgtcttcaccaacgaccacgggatcaccttgtcgaataaccccggcggctcgaatgttagtctgaccttggcgaacatctcatacccgatcactaccaccaccgctaccacgcccaacgacgcgacctcgaacccggcgtctgtgattgacgaggccgagctgcaaaaccacaagctcgaactcttggagaggcaaaagcaacatcacctcaggcaattcctttattaccgccagctcgcagagcaggaggaaaaggagaatcaacgccagttgatcgcacagcagcaacaacaacaacaacaacaacaagagtcgacatcgtcgtttcccgtcgaccaggccgatctctcccaaggtctaggcaagacatcggcttggatcgcttccctcgcccaggtcgagcaggaacaaaagtcgctcgaaagacagcaacagcaacaagggcagcaagcggtcgatccgacgtcggcctacgttttccatccggccgatagcccagggtctcaggtggacctctcggtctccgccgcccctcgttccgactcgaacgagctcgtcgaggataccatcaccggtctgatcgcgtacgagtccgactcgcccatcttcccccacgtcaacgacggtatcaacgccggccaggtcattgacgagacgaccgcctttatcgacgattcgatcgcccaactgttgcattccagtgccaactcgacgtccaggtcgtccgtctcgagttcgaacgggacgatcatccataccccatcccctccttcgtccatcgcgcacggagcaagttcgggccgtcacgtcgatcacgccaccgacaagcccgtcgagtgggatccgagcgcgttcagtctagatctcgagcacacgtttgagccagcgctcttctcccaccagaacagttaccaggcgcccgtcctagggaacaacgttttcaggtcgaccgccgtcaagagggattggacggacatcacttcgtacgcttccatgtacgaggatcaggatcgagtcggtcttcagcgtcagcaacaacagcatcagcagcaggtgcaggaaagtcagatgttgacccaaaaacgacagatgatgggtcaggattcgcagtaccacgttcaggctcagcatcaccagatgatgggttacggcgccaggtcgtcgatcgacggggtcgggttgcaagtccaaccagacgtcagggccatcaacgtcaacgcggccggttataccaatcaacagatgatggtcggcgcagacaatgggatcgtcggtgcctcgcaattcgcgcacagtttcccggcttccgctcagggaaggatgatgatgatggatgtgacccctcgatacggcatgtacgctggggatggccagtatagcggccatctcaacaacaacgcgtcgtcgaccgggatgaacatgtataccggtggatcagggctcgacccgaatcacgttcagcagcaggaagctctacagggcaggacgaacgggtcgttttactatgacaccgcagtgggaggttacgattccttccagccgacgttcaacgggcgggtcttgccggcgtacgcgagcatgggcgccgtcgtccagacttcgtccccgacaatgccccaccaacagcagcagcagcaacaacaccaacagcaacaaggtcaacaacgtcaagagcaaaatcgagcgtctatcggtttgcaatccccagagagccgaatgaaccaaagtccgttgagcgactatcatcgcaacatggccagtcaaaacgccgacaatatcaaccatttgttgatgggcggtatgaacggctcggctgaagagacctccactggcgtcaagagggaacacatttccccgcgcttacaaaagtcgcatacagacgaggtcgatcagatcgtcgatgatgatcaggatgaccgggtcgacgactttgatgatcacaggagcatcgggagtagtttggtcgacgagctcgatgccgaagtcgaagccgcccttggtgggagctcttctcgtcgtccctcgcagttgcgtaaacctagcaaggtcgctgtcaagtccaagtcgcaccgcaaggcgccctatgccaatgatcaggccgatcgcgtcaagcgtcgcaacaagtccgtctcagctgcggcttccaactcgtccctaggctcgggcgatctgtcgaatgggtccgaccttgtcctctccgagcgggctgtcatctcgaggaacattctctacgaggacgggaaacccaagatcaggaacccgctcggcggtggacgaggctacgttcccggcgagaccctagacgatcctagcaagaaacacaagtgcgaggtctgtggacgtggttttgctaggctcttcaatttgaaggtgagctggtttccctgattatcgaactgaatggctcgctgatcgaagcgtccttgcgacttgttttcatcacagtcccatgctgccactcacgacccggtcaggaccaagccttacccatgccctcatacgagctgcccgagatccttctcgcgcttgcacgatctcgagaggcacaggcaaggagtgagtgatggcctcgtgcggtagcctgtgactgtactaaactttcaactttctagattcactctgatggtccactcatggacgccaaggttcaaggaatcgccccgtcattggcccgcgctcaagagcgaattcacgctcgggaagtggccgccaaggctagggtcggacaaggaatcgcccctgtccctccgccgagacaggacggaccggctcaaaccgactagacttatcaagacgcgaatcgcagtagacgatctcgtgcattcatcctcacccccaccattaccagccgacggtctcgaatcgatatcaccgttcggtctctctctaccactaccgctttctccttttcatactctcgccctcgcttcttcgacttcttggaacgatcaccagctctcggttaagaatccatttcgtggatgtcaaagctcgagttggaaagcgcggtctactaggatcacggaagccttatcacaatcccccatctttcaccataacaccatcctctctccccctttcctcttcaatcccgacctcaacctcaaacctcactggagtgctacgcagcctcggctgcacctatctatctctctcctctagatttgatacgcgtactctggtttggcttgcaggtcgaagcggaaaagaatggacacacaaggacgagacgatcggatgcgtatggcaaagattcagggaataacggaaccgtgatctcagcccgtggctgccaacgtcaaaatcaacaaaaaacacaaaaaaaaaacaccgagctttagatacgcgggacagattcttatactttgattcgagcatcggtcgcctacaggaaacagcgaagtagacgggagcgaggacatcgaccctttctcgtggctcgacatcataaaggaggaacgaaggactggtacagagggacagccgtctcacagacggacatgaacactggacatcttttcacccctcgaacaacatgcaaagtggaaagacctcgcccggcttttcggtattttccggatctcctcgcacctttcgcatctttggcatcttttcaccttcgacgcagtcatccaaatctatacacgaccacccggatactgcacattctcactcggacctctacatatcacaaaacgccctcaccgcctcatccatcccgctcgaggacgtcttgcatcgccgttaccgaaatgatttgtgtttgggttccatcccaacatttctctttttttggatgcaagatgtctgctgagcctagcgataggatcctggaccgtcgagagtcgtcaccttctcaccttgagatatgtggaatacggaacgagctgttgtactttgagcttcgaccgacgacgtggaaaaaaagataaaaaaacaaaaagtatatcgtttccatagctgttctcgtcttgtagtgcagcgcgtttttatagacaaaccgggtggaagagaaaacgacaatgccatatcatgctgccaaaacatctggtgcaaatcgcgtatgtttggacaggatttctcgaatcattttggatttggcataggacttgggtgccacccaggtagaaccactcagtcagggaggacattcaatgctgtgctggcagaggcttcagacatgaggtccgacaaaagatgctgcttaactcgtatacaactattaatatattgttcctatcactcatcaccaggtcgtcaacgtcggagacctccgcctggcgctccgcccatgtatccacgtgctgtgggcatcggatagccaccgggtcgaggcatgccttggccgggataccccgaagtcggggcggctggcggtctcgcggtcggtgctcttggtacagctgatcgctgttggtctggtggtcgtgcacctgttgccgccgccttggcccttctctctttatgcgccgctcggattgcaggtatccgttcgatcaactgacgtgaaaacagcactcggtcagattcgcatcgagcgtgtcaaaccaagtcgagcagactcacctgctcttgtactaccccgtctttgatgctgtagatgatcttgtcgccaatgtcgatgaaattcccatcgtgcttgtcgtccctgaacctcatgaatttccacgactgcagctcgtcgtcccatgagcattcgacgatccgttcgtcatactggtctcccgatgctttcatgctgaagctccaaataatcgcacgtcagcttgacttgatgcatcacaccgataggcgctaccgactcacttctcccactcgtcgtcactgatgaccatccgatcatgaaagatatagccttcttgtcctctcccacctcggtacacgtacagtagaaaagcgggtttctctgtcaaatcgggtagatttgggttctcggcggacggcggaaatcgaagtgtcaatttgaagtcgatcgagttttcgttgggcggcttccatttcaggctgtttggaacgtccggcaggatgggatcagcgactttcctgtgccttcgaaagttttgaactcttacatattgttatcttcgcctatcacgtaaggcgtgtccacgcaggtgaataccaatccatcatgcccgtgctccagtttagggatcgtctcgagcaacaccttgtctagtccatatgcaagttccatcggcttgttgatgactctgcgggcgaagacgcagccgtgtaagcggcgttccagatccgtcgcggtgctctggaatggctcactcgaatggcatctgattcctccattcttcgtaaatcttgtagtacttttgttgaggctcgatcaaccattgccgcattttctgaaacaggacagggggagagtcggtttcctgggaaggatcaatactatgaaaatcttttcgcaaacgtaccccgtatcgtttctccaggttttgcgtcatcatattcaacccgttatataccaacatgtcgaagatgtagtatctgagcttgtactacgacaatcagacagaagcacatgtcagctagcccttcccccacttcaactccagctgcgcaaatctcagccgggcaacccacctgccccgtgaacttgtctttgtccagaaccaattcgccatccaccaacgttgtcttgcaccaattccgctcgatgggtcccgtatccggagctcccggtctcagtgcggaactctcgtaatgagggaaatagagccccttgatctgtcggtaatcgttcttcctgtctatctgattcccgccgatagtcatgcagatgagccgaggtatgtcaaaggtggaatttgcgatgagagaccgaggtcatgctcactaaaaaggtgtcttgctcgcccccgactgcgttccagaggatgagcaggagcaccctgacgccgtccgtcttttcgcacacccaaaaactgtcgaacggggtgatagctacgagattagctggatattccatgcttatgtgatggtcaagtctcagacttgcttttttctctccaactggtcgagaccgtgcgaagtcatactgacaggctgagcacccggaaatctgatcgaaatgcaagacagaatttaggagccggtcttgctcagtgatgcatgggccgtctgcgagaacacagcgcttaccggcccgtaaacccaggaatgatctccctcagcggtgtctgtatcacatctctcatttctggtgggatgagatgacccgggatatcagggatgggatgctcttgatgaggatttttcgggggttcccgcggccgaggcggtcgctgcggttgccgatttgttgcagcatagggattcatgctggaagggttacgtctagcttgtaagtcgaatctgatgctgcttctacctgtatgtgtatgacgagagaaggaggcaaggaagatattctgatctactttgtaaagactttcgacctctctcctagcctcctcgcgtcttaccctttcgctcgcgatttctctttcggagctgggcgacgagtcgagtcgaaacctggtcatgacgtcgacgacatcttgtcaactactactactctactctgcacattaatcatgcatctcatcatcgcctattgccttggaggatatcaagagccagaacagtcaagttcagagctatgctcagaccctctccccgctagattcgcaccagcaggaccaaattagcgtatcttcaccacgccacaaattcacgcctgagctgcctaggtgtccttagatgcccgcagctagagcctctattggcgcacacctcgttcgaccacgaacacctcctcagatgttgaacactaggaacatgtcgggatcttccgctgcccagcaaaatcaatccccgggcggtcggccgggccctcgacgagatgatggaaaggcgaccgaccggtcgcagcaggaatcgtcatctcgagcaggaccttcatcgaattcgcaacaaccgtctccgctgggaagaaatggtcctccgcctcttcctgctcgtcctccagtctctcccacgaccccagcatcctcctccttctcttccttcttcagttcgtccggcttgtcctcgaaggccaaatcctccgtctcctacctagcgtccaactccaagccctacaggtctgccatcgccatggccggctcgtacgtcgcttcgcagacaggactcatacccgataggtcggttaagggcaatgccgagggcaacgacaaggagaaatcgtggggcgaatgggctcgggattggagggaccgacgagcgcaggaaggcaaggcagaggaatctctgaacctcttgcccgggtgggtcgtgcttcgaccgaggaccgataaagacaaggtagaaaccgcaaatgggcgaggtgagtcgaactgtgccgtatacctgcatctccaatgctgcggaaatcaggctgatcagcacgatcgctacctttgacccccgcaccaccagatgatgacgtcaaacctttcgacctcgaaatatcgacttcggggttcgccaattccctacgaagtccagagaacgccagtcgaagtcaacgcgtgttcatgaagatcgccaagagtgagtctggaacaagtacacaagtataactatccatctgatcgagcaatggcgtgatcgttactaggttttgccgcgctcccgaatctgcctgcgaagatagccgaggatctaggcggagagttgagagtctcgcctttgcctacgccgggtggacacaaggtacccacggtgcaactgagcgaagaaccggagcaactcgattctcctgagaagaccacgacggggatcgatatcgggactcctaaagcggacggtgtcgaccgcgttcgtgggaacgggatggtcaagaacccgcagttgaaacggtcgatgactaccacgtcgaccgcgtcgacctcgactctctcgtccatggaggctagtttcctcaacatgacccaagatcagctcagggcgtttcacgaaaacttggacgcgaggttgcagccgttctggtcgtcggccttgcagcgccgggtgcagctatccatttatgcagtcaaagtcccgctcgacaagcatcctaggcacgatatgaaagagggacatgaagtggcggtagacccgcccgacccagaggaagagccgttgatgaggaacgtctttacgactgatgctcaagggctgtttgcgcaaaagattgtgattccatgggagaggatcatctcacatggaccgagtttgcccatggccttccaggacccacccaaattcgaatattcgacgggcgaacaggaacctcaaacatccacgtgggggttgttcctcaaggcagaactgctgtcagaaggcggagcgaatcgacttccgccctcggccacggcattgcagccaccgtcatcgccgtcattcacgtcagggaccttgtacgagggaccaaaacctgtcgagttggatgccgacatgtgggatcccggcgccaacgcattcttctccccgaacgctcaaccgttacatcatggaagcggaggaccaggaggtggattgatgaatctgggagcaacgagggtggtggctacaacttggacacctatcgccagcgtcggtggcgtccgcgtcatctctgacctcgacgatactgtcaaggttagtaacatcttgagtgggacgagagaggtcttcaggtaagtccaagatgtttcgtccagccgatgcatgtgattgatgtagcatatacaggaacgccttctgccgtcccgtcgaggagacggaagcggaaggcatgtccgagctgtatcgccacctcgccactcagggtgtcgccggtttccattacgtctccaactcgccttacgagctcttgcccgtcttgcaaaagtttttcaaacatcacgctttccctacgggattctcgttaaaggtgagtcggtcaatcgtctctggtgcgggtgattattgctcatccgataagctcgcttcaccgcgacagctcaaatactatggtggacggaacttgatgaacggtcttttcgaaccgcctggtgataggaaacgtccgggtatcatcgacgtcatggactcgttcccgcgagctaaatttgtcttgatcggggacagcggagagcaggagtaagtcgagcagtagtatgtacatcggcccgatctaacgctgactcctgcgccaaccagtctcgagctgtacgtcgccattgcaaagcagagaaaagatcaggtcatcgcgatcgccatccgggatgtcacgaccccatttacggcagatctcaatcgattcgccaccaacgcttctagcgtttcctccatgcgatctggagtcaggacccctgtgcgacagtcttccgcggtctctagcagcgagattgatctggctgcacttagcgaagcgttggctgccgaggggacgggagtcgatcaggcggcccggagcggtgttgctggtaggacgagggacgccgctagaaagctggcgggcaaggcgtcggatctcgatctgagccgtttgaagctacaccggtcggacagcagcgacgatgagacggtcagcccagctcgctcgggaagctcgacgccaaggcgggtgaatcatgaccctcttcgacgtcatcctgaagacctcgaagaggccatcgccgatatcggagcaggcgacgatctcacaccccccggtacgcccggattcaatgaccaaatgatcgtcaagcagacggaagccgagatgcaggagttgacggcgacccagctcaagctggtcaaacgggcggccgagtggacggacaggaggtccagggctcaaacggaattacccgaggggatcaggttgttgttcttccaacacccggaagaagtggaagatgagattgttaagatcgttaggtcggcttatgggacgaccccggcgagctaggggatatctacgaggggtcccttttgaggatggcatgatttgtagttcagatggaacgtcatgtaaatcggtttgatagcacaacgagcagaattcggatctcggtttggtctctatccttcattctcatctagccagtcatcgcaaacattctttactggagttcggtatgcaagtcggcgtacgggcgaatgccgtctagaggtagctgacgaattacatgtttcaatttaaatctcgatcgactatcgagattgatcggttgaacgcgtcgcgacgcgtgagattcattgcgcgccatttcatgctgctttgttcgtaggtaggtaggtagatggcccgggtaggtgatcgatcgaatcatcatcctacacatgtcgtcgtcatcaggattgcaaggtcatcctgtacgacagctgctacagcaccttgtactgctagctttctgtgaactcacgatatacccccatacccgcaaccacttgttgtttcgctgtgcatcaaccccctagccaaagcgacccattcacgcgacgatgctcctcaccgagctcatcttgtccaaaaagggaccgctcgccaaggtctggatctcggctcatcaagaacggaaactcagcaaggctcagacattgcaggtcgatgtcggggagactgtcggtgagtagtcctctgatcgatcatacggccggggggcgtcgagcatgccggacgagcccgctgatgtcatccgtctttcgaccatcttgtacagaggctatcctggagcaagatggcgaacccatcgcactccgaatgtcgggtcagctcatgctgggagtcgtccgaatctactctcgaaaagcgcaatacctgatggacgacgccaaggacgtcagggacaagatctcgatggcgttcagaccgggcgaagtggacctctcggtggaccaggtccaggcgtcaaggaacgcgatcacgatccaggatggaggtgatctcgccatggccaactttaacatggcattggactggtcagtgactcgtcgctttacgaaagctcgcgttgtcacacgtttgctaatctcagaggaatcgaccgtagggaggacattgcccggaatttcatccccctcggtctacacgtcgccaatgaggccgatatcaccctcccccgtgcacactacgcatcctccatccgatcatcctctgtggcccgtgaatccgagaacggcatcgactcgcaagatttcgaacaaggcgggatcgatctcggtctggatatgggtgacgataccatctcgatcgaatacggacgtgaagcgcgcagcgaacgggcgagcagtgtggccagtcgacggagacagcggagtatgagcctgttgagcggggtcaagtcggtacagggagatgacgacgtcttgcgcttgggttccgagctgggggatcaacacgggatggatatcgatctcggcggacaagagttggatctcgggctcgaccttggaggtgggttcggggatgtcggaggagacgccatggatgtagatatggacgacgaggagcgtgaacgggctaggcgggaatcgacgaggttgtccaccccgcccccgttggacgagcaggacccgagctcgatcggcagggatctgtcgccagagaccgcagggaggatcgccgagcttgcggctcagcaagaacagcgcgcagagagggccaaacccaagaagcgggtcaggatcgcagcgatcgacgaggagatcgagctcgaggatggcgtgggcaggagagacgtcacggccattttaggcgaggtgagtagcaaagacgaaaccattctttgcctgtctgggcgctgaaacgaacggcgaatttgctaggaaaactacctccctgcttcgaaagacatgatcgccttgctgcaaatccgtcaagacccggtcgctttctactcgcctacggtcaagaaggacaaccaggactactatctcgctggccctgttagcgggatggcggaagagttggccgagctgttcatgatccccgtgagaagtgggattcgaaggggacccgtcgctccgaccgaaaggcaggacgaggacgacgacatcgaggtcggtcgacgggatgaacgacgggccagcgaacggttcggtcagggcggacccgatatcacgttggacgacgatctcggcggctttggaggattcggggatgacacaggattggagcttgagcaggtcgaggggatggacgacgtggctatgggtggagatctcgccaggaaacgtgacgcttctctcgccccgtcgatggctgaacgattctcccgtgccggttccgtggccaggagtatcctcgaagccagggtcgaagcttccggtctgtcggacgaatgcccgatcgcctttttcgatacgcgcctacgggtcaacggggttccgcaggctcagagctctcagagtcaggtcagcgaggatttcaggtcgacctctggccaaggctggagcaggaatactgtgatggcagtagagtacctcaagggcgaactccaggccgagggaggtggattgaatgaagacaagagtttgagctttgatgcggctgcgagggcggtaagtctcgattgaaaggcgttcttgccgactttgcgactgacgtccctttcggcgcgcttatgcagtcttccaagcgcgcggcgtcgacaatgttcttcgagctgctcaacttgggcaccagggacatggtcaagctgcaacagaacacggcatacggagacatcgaggtcagggccaagaccaagttgttcgagacggccgctcaatcgcgagccgagagcgaagtgccgcagcagattgccgtctagaagaagaggccgggcttgataagacgtggcgactgtttattgtatccggaaattataatcggtatttcgagcgaaagtgggtttcttggtcttgtattggttgtgattgatgaaatgaagaatcgacgagtgggcgacaagggttgctggagacgcgggcccagctgccgaatctctcggagccgtgttctccagattccgatcggcataccaaggagaatgcacattctgacacgtcttcttgacagtaaaatcggtcgctctttttctagtagtatcttgcgcctgcatatcgcgaaactagtgctggcgggcatcgcaaaagtcagcgatgacgactggtactgatcccccctacgagtcagatgccaagcagctttttggaaaccaccaagattccgaaccgtcagacccaattttccaggtggatatgggttcccaagcgctcacgctgtacataagtaatacagacgccaggctgtgatcatgaggtccgacatagatggcgctgtcgaagtgggttgtggcaacagatagagaagcctgttgatcgtcatgtgtccaactagaagcgcgtctcgctcgacccctctttagcgcgtcacgtcacgaggggcatgatgtcacctcgtttcctataggacgaaatcgtcagagtgacatcgactttgataaacctagcgtacaatctacgatcatctatatcaccacagaccacaatctcataaccgtttccaagtctattcaagtctaaaccacacataatgttctccctccgaaccgttgcccgaacccagatccgatctctccgagtcgccgtaagtcccccccatccttgagcggatcatttctggtcgactgaaagcccgtcgtctacaaccgtagcccgccatgtccgcccgtggctacgccgatgcccccaacgccgcttctgctggtggagacaacttcaagtgagcccataatcgcctgtcgaactgattcaacgcgttgacatcgactgttatgtgtggtgtatcataggaaccgagagcaggccgaggagagtgtctacgtccgaaagcaggttagttttgaactgccattcaagacatatggtgtataacagttgacatgatctctctcctcgattacaggaggctttgaagttggccaagctcaaggagtcgctcgccaagaacgacgaggagaaggtttgtccgggtctgacccatcgcctcctagccaaacgaagactgacgcgaccttttacccccttttgtaactccatcagaaaaagctcgagcaggaggtcaaggacctcgaggccaagtctgcctaaagttggaaacgtgcacatcttgtcgaatatgaaatggtgatgtaattcatgctaaatatatgagatacaatttcgaaacccctttggacgtctgcatctgatgctgcgactacgcccgtttcaagccatattgcccaagcacgtcatcggccggccctggtgaggggctcttgaatactgggtctacgccgcccgctgtcttgggaaaggcgatgacatcccggatcgaagatgttccacacaagatcgccacgagcctatcgagtcccaaggcgatcccggcatgcggaggtgctccaaacctcagagcctgtaaaaggtgtccaaacctcgccacctcgctctcgtccaactcgagcaccttttcgaaaatgtactcttgcagcttggcatcgtggatcctgacgctaccgccgccaatctccataccgttcaggacgaggtcatagtgctgaccacggacgagctcgaccttgccgttcttgagattctccatgtcctcgaacatgggcgccgtgaatgggtgatgcgagctcgaccaccgtcccttggcctggaactccttgtcctcgtccgatcgggtgaacaaggggaactcggtgatccataaaaagtgagggtcagaaggcagggtcaaagcgccggcttctacgagttgatctcgcagcttgatacgcagacggcccagttttgtccagccagactgtgattccattatcgcataatcagccggtttccagagaagaatgacgccgaaacactcacatcgggttgctttcttcgcttggccagccagactacatcgccaacttcggctccgccctctcgagtcgcctcgggatgaaggtctagcgattttagtagatccgagtcggtcacccatgtcgtccggttcgccgatgtgatatcgatcctttcgacctgacagtccgtaagatgatcaacatcgcgaactccagcccgagtctgagggatgcgcgccaagcttacatcatgcatctcttcagcgagcttgtccatctgcacggaacgtacatcccgcttaggggtgatcatgaattcgaccgtgtcgggcttttcatccgctaacaactggtcgatatcggcgtccgaaagggttgggtagtaggcgatcggaagggtctgcatcgacggggtgtcactcagtgcaatgcttcacaacgaggtcgttgcgcggatgctactcacatacatcttgaacctcgtatccggcttgtcggaaccatactacccgatcgcaaggcattccgtgtcagtcggcgcaattgaacttgtctctgactctgccgtgactgaccacatccatggccacctcgtacggcatgacctggaaccacccgggtagatccacgccttcgatttctttccaaatcttcttgactagcccctcgatgacctccctcacttcccctcctccaatcctccatgtactcctcatcccggcttctccacctccggcgcctgtcgtggtcgctgcagccccgctgacaaagctcatctccagatcgacctgggtaaactcggcctgtcgatccttcctaccggattcgtcccggaaacatcgggcgacctggaaatatctcgatgtcaaccccgaagcgacgaggagctgtttaggctgttgaggagattgctgaagcgcgtaaaagaggggttccgacacggtcggcgtggacgtggcggactccgaggtttgtgaggtcgaggtcgatgtcccgggtacgggggaagcgagtcgggtggggacgagatactccctcgcaccctctggtgatgactgtaagagcacgggagtctccacttccgtaaactctattcaagtccagacggggcagccgtcagcaccgacctcgccgatcaatcatgatcgcgtcgactcaccgagatcgtgcaggtaatcccggatcatcttggtcacccgacttcgtttcttgatgttctccccgagcttgtctgaccggagatcgaggtacctgtactggttcctcaggctctcgtttgcgggctaagatatgatcggcatggcgtcggggggagaaagagaagtgggatcagtatcagccgatctgaagggaatcggtaggacttaccgaatcccggctgttagggtagaaagggaggaccttgtcggccgggttgagcagtgtgtatttgctcacgacaacctctacggcaccctatacttgctctctacgcatcagccgacaacacagatcttgcaaaacgcaacactgtactgacctgcttgtcggtcttgttcgtgctcaacttgctcttgaccgacccctcgacctggacgacgctatgcaatggcaacctcatcatctcctcgatcgcctttttcccctgctcgacgtccccggacggatgttccttggcattgaggacgagctggacctggcccgtcgtgtccttgaggttgaagaacgctaatgtagggttggcctgtcgtcgactgatgagccatccgcctagggtcgtcgttttgaaaagggacgacgagttcaaggccgagatctgatgcgtgatggccgctcgtgggcctacaacagggtgtcaaattcgtcaacgttgtcactgtatagtctttcatccagcttaccgaaatgtgcctccaagaccggttcctccgttgatggtttcggtaccgactcggcattccgtctcaaactcgtcgtctgaaacgatctcgtgcgagacggcttagcggctggtgtggaccgcgtcgagaccgtctgagcggctctacgagttgctgtttgtaacagcgtccttcctagcatgctattagggtgtcttgtggtgtcaaggacgagtcgttgtggacgctagacgatgactttgagacctagattgaccaacatatataactagttgtacttgaacttggttatcgtcacgtgattcaaacatttgtcgattgagatttcgaaacagccgatcaccgaagagggacacttttgctatgtaacaacatacatccattcgatatacattctcaacccagacgatcattgaaataacccaacaaacacacctggtagacatgtcgggaaaaagaacttacgaggaggacttggagccgtccaccagcgatgtcaaggtcgaagatggcggttcgaaaaaggctcgtaaagagcgagtaaagtgagtcttgcccaactacgtgctttttcctcgccgggcactcaatacaatcttgaactttgcagcactaccgtctttgtctcttcgttaccttacgagacgaccacgaccgatttaatcacccatttctcctttatcggacccgtcaagaacggtttcgtcgtcaaagatcgagtcagtagcggctctgaggttgaacctttccacccttggttccatgttatactgattcatcattcccgcatcttccaggattcgggtgaatcaaaaggtgtaggatacatcacttataccgaagttgaagatgcggaaaaggcggtcgaggagctgaacaatggatcgttcggcgcttcgacgaggaagatcagggtatcccttgctgataccaaggtaagccgattgccgtcgaaaccgtctccttttttcccgagggtatttactcacgacgtctcgatgtggaccgaccatctagccgactcgtctcgagcgaagtcaacacaagactatcaccgaggaagacgccgacattccttccctccctggtcagcccgccactccctcgacctcggccgcagcatcgatatctacccgcacgaaacccgttcaaccccgtggtcaacccgccaaacgctccaccgactcgaacgccatccgaacgctcgtcctcaccgggatccctaccgacgtggacaagtcgacgttgtggaaacgggtgcgcaaagtcgccgggatcgaggggggcaagcacgaagccctccatttccccgtagacgtcgtcgctggggaagagacgaaagagaccttgggacagaccgccaacgtcgtcttcacctcgcaccaaaaagccgtcgaggccatccccaccctccacgcacatacgtacaagggagccctcttgtcctgcgttctcaagaaacgtatcgagtcctccagctcggcactcgggggagacaatagcgggaaatccaaccgggccggtcgactgatcgtcaggaacttgacgtggaacacgaccgagacggatctccgtaaaaagttccttccctttggacccatcttggggatcaaccttcctaccacggcgagcaagttgccacacaaggacccgtccaaacccgcccctccaccccgggccagagggttcgcgttcgtctggttcttgagcaaaaaggatgccgagagggccattgaagagaccaacgacaaggagttgaacgagaggaagatttcggtcgattgggcggtcagcaaggacaagtatgaagaggccaaaaaggaggaagagggtgtcaaagaggacaagatggatgtcgatggggacgacaaggacgccgtcgaggccgttctcgctggggacaagagcgaggctgtcgacgaggatgaagccgaggatcaagatatggaggccggagaggacgatgacgaggtcgaggaagaagagtccaagcccgtcaagcccgtcttgcccgccgtcgaagagggatcgaccttgttcatccgaaacgttccattcgaggtgaccgaggaggagctccgtaacctgtgattgtgaccggtctcttctagtacacgacgactgctgactgtcgcttttgtcgctgcagcttccgaacgtttgggcccctgcgatacgccaagatcaccatggatcgtgagacgggtcgatcccgagggaccggattcgcttgtttctggaaacgagaggatgccgacaagtgtctcgacgaggccaaccgggtcagggagatcacgggtgccaatacaatcgatttgacgcccaagaacccgttcgccatgccctcggtcttgcagatcgacccctcggccaacacggccagcaagttggttttgcatggacgaacgctcgaggtcgtcagggcgttgacgagggaggacgccgccttgaagaaggaggatggggagaggtcgaggctgaaggccgataagcgaaatacctacctgatgagggagggaggtaagctgaaaaccctttgatgcggtgcggatggacatttcgctgacaaacatacgacggcagtcatctttcccaatacgcccgctgctcagctcctgcccgagactgaggtcgagaagcggtcgacatcgttcagcacgcgtcgaaagttgctcgaatccaatccggcattgtatatcagcaagacccgtctgtcgatccgacagattccgctttatgccaccgaccgaacgctcaaacgattggccatccatgctgttcgagaattcgacaaggaagccgaggccggagaccgagagggattgtcccgcgaggagctcatggacgagaccttgtctcccgctttggaagccaaggggaaaaagtcgacccgaggtgaacgaatcaccgccgtgattcagagcaagatccttcgtcaaaccgaccgagtcgatccattgaccaatctgggcaagagcaagggattcggtttcctcgagatgcgtacccacaaggacgctctcaaggtacttcgatgggccaacaacaatcccgaggtcgggcccttgatgcgcgaatgggccgcaaccgaactcgaggagctcgagcaaaagaccaaggacaagctcgaggctgcacgcaaggaggagaacaaggatatcgacgagatggaactccgatacaagaagctgcaagccaaggtcaaggatggcgtcagcggactcgtcgatcagatgaagcagggcaagacattgatgatcgaattcagtgtcgagaacgttcaggttagtctgaaggcgcatctcgtatctcaaaagagcagtcgattgacttgctattgtgcttttgtaggtcgtcaagcgacgggtggagaaagtgggtgaatcccgacaaggaggcggagcctccgatcgcaagcgcaagtcacgggccacggaggacgactcggatgacgagggtcgtccggccgtcaagcgagagtcgaggccgccgagggaaggcaagggcaagcctcgacgagagaggtccggtgatggcgagactggtgatcgacccaacaagaaggcgcgaacgggtgccaagccagagggagctgctgcttctgcgtcggcttcggcgccggcggatgacaagagcaaggcaggaaagagcatgggtggattgatcggaaagaagagaaaggagcgcaaggccaaggctggcaagtagatgccgatagcgaatgcagcgatacctcttgtgttgtaaaataggttctgcgcaccgacaacatgatacagacgtcatgcgctcgagagagagtattctgatggcaagcaccgatctataccggcctgtttcagactcagtctcaataggtctccaaagtatgcttcattgatcaggccgatgtacgggttcctatttactgactgcctaaaagtccgggatatccacaatgcccacagattgttcgtactcgataagctcgcaatccctagggtctgctcggtgaccgatttgagtctcaacgcaagcaaaatcgattggaccgccaatggtaagcatagggtggtctgcggtataagacctagcgtcagtcaaacggtgaaacaatgagtctttcggccagaaacacttacgccaggttccggcgtggtagttgactccctggtcggccgtacaaaagaaggccttgatcgaagatgtgtccggcttgtcatctggacagcaatcagaatggacacaggcattagcttgagcttcaatatgtaatccgcaccacctcaactcacctgcaccctggtctgctacaatgaccacatatgcagcaccattttcgacaggttcttcagtctttcccgcccactattaagcattcgaaacaaggctcagaatggtccatttgctgactagggaaacactcacgcttgcaatacccatcggtaggaaagcctgctcagtaaaagggtgtctttccaggaaatggacaggccatggcttgcctttcctcttcccttctttttcggtgcaacggaacacgctgacagcggtagtggcgttgacctcggcgggatagctgttcgtgactggcgatagctcgtggaacttgatggtcttgccatcaggggctacctggctagcaacaccttgcggggcgttctccaccgacccataggtttgaatgacgttaccataggctttgaagctatcggcagtcagcttttggcaagtgatacccgaacctccgagcgaagagaccatcgacttgagtgtgctgagaggcccagccttgactgcatgcgttaaagctgccttgatcgaagcaggttccgaagagagcttgggtatggtgatctgggcgatggtatcaccaggcttgtaaaagtcgatgtcggcctcaggaagaggtggggcgacctgtcgtgtgaggattggttaggaacaatgtcacgcaatagctaattggttgtgacttacactctcgatggccgcataagtcaaagcctaaacattacatgcaaattcacgtcagaagggtgtttcagtctagcaaagacgctcatactcacagcatccgcagtcaaagtaccatggtctaagtagatgcatgagcggagagcgagttcagcgatcggcaggtgccagccaagattttgtctcttcggactcacgccagacatctcgaccatatgtgacgctctggttaggaagcacccggaatgacctcaaactgctcaagtcgggttgaccgcctgtgagccaaaggcagagggctcagaaaagtccttggatgacatctccagctgagtcgtgagcttactagcatcgctcaaagctaccgtgacgatgtacgagccactctgagtcgctgagccctgaccctcagtcgaaccaagaggaacgaaggtctgagtcgtacggggatgtctatgtgtagaatgatgagcttccgtaggcgaggaagagtgcttcgactcacttctccagctgcacgacatcccaaacggatccggtctgaactttgggctgggcggtcatcacgctgatgatagtcctgtgattctcgctgccatcctttttgtagtcgtcctcgaccagtgccatcttgtgatacttgcatgcggtcccctgattagcaggcgttttgggaacaccacgcggtgccgctgtgggcactgagtaggcttgggcgactcgcccgtacgggagaaatgcctcgtatgtgagaggtagagcctccagttgaggaacagggttggcggtgtgtgtggccggcagattctgtgccgagtatgacgaagcgcggtacccaaggatcctcaaacgcttgagaccaccgtctgatgaagggcttgctggttcagatcggatggtctgtcccgcgaacggaaaatgacttaccaggccagatagtcaacttgacgtgggtaaagaccttgccaaaggcattttgtacggggtagaagtgttgacgatgaggaccttgcttcatcttgggcaaaatcgacacccagtccgggctgtcgagagcgggtacgttctgccgtggctaaatacatgagtttcgattactttttcgaggaggaacagtagacctacctcggcgcagttgatagcatgcagttcggcgtactatcgcggagtcgtaccattaagtaagcatagatgcgctctattttagagtctactcacgacggggaagttgcccatatgatacgccgtatcaatctcaacgttgtcgatgtatcccgcatcaccactagcatgatcatgaattagcgccttttcgtgtcttgtcccggtctcaatcgagactcacagtttgacgacggtccattcgttgttcccggcgactcgactcctcttgcactcccatccatcacccatatcgaacccccggccgggcaggaggaggttcgaggcgatcccaaagtgttgatccgactgggcgacgatcctgcctccattcagcgcgtacgccagatcgaccctctcagaggtcgaaggggcctgaggccaaccgtaagctcggaaacggccctgtagatttccgatgctcctcagcgactggttggatccgtgtaacctcaaggtgcgaatgttcgggacttacgaatccgccatccgggatcatggagagcttgacgtgtgagtaggtcttcttggtaggctcgatcttgaagaggtgcctcgagttgggtccgagcggtacttcgggcaagaggagctcccactgtggcaccatcatcgccacggacgagatcctcaatgcgaggccttgtcacgactaaaagaagatttcattgctcaccctcgagtcgtccccagcgagagctttttcctgcttctccacctccttcacatcgccctccagcttcaaaccccaaacgtccgccgcgggtccttcgttgcccgtaaaattggcagtgtcgatatcgaacccggtaaggatgttcgaggggggtccgagccggatgatgaccctgcatcgtacaagcgagtcgagaaaccgagaggtagatacggtaagataggggtaattccaagcgatctactgtgcagcttaccagtcgtggtccggggcattgtggcgtctggtttcccacccatcgtataaagctcctttagggccaaattgacccttcatcgagactgaaggctgttttcaaaggaggacaaccatcgcgttacgaaaagaagctagtcagtaagagtctaacggtcccgaccacgaatgcactgctgtattgttgtagagtagcaagtagggtcgactgtgatcgatatttacctcgactttgagcagattgctggcatcagcaaagaattcgtccgagaaggagacgatcttgccgccgagagcgaccgaggagacctctattccagatccgcaagagtatcgccatgagctatcataggatagctgtcgcaccggtcgctcacattacttaccggtagaggtttccttgaaaacctcggcaaatctctccagagggatggattcgtaggctggctgtgacatgatgttggttgcttttctcctgtactcgttacgaggtagatgtatcggcggtgcaggtaacttttgtagctgtagtctactgatcaggactagcagcaaaaagtaatcgatttccttcgaaggagactccgtcactaatttgggattacgagggtgatgtctagactgttagtttgacgatgtgcttgctggcctaggctggttgttactcgattattactcgaccgttactcgatatctcttgctccgtctctatcgacacactacatgacctttcggaagcaatttcgttgcttccggcccgaacagtccggtccgataagctcggagatgaagagccggtgggggtgagcgtgaccccgctttttagggtttatttccacctagatggctttgtagaccactggcgtttcagcgctgaggtacagatatctgagcttccggtgtgattcgtctgcataagctagtccatccgataccacgcgtttcccacccgtctatcttttggatctcgaccacagtgtccttaattttcatgtcgagtctcgatacctaaaaagctgtagtcgcctcgtgacaccagcgccgttaaaggcggcgacaaaggagagcgaaaccggtggtgcgccactgggttggatgcaatcaggtatatattcaggtcacaacaaagtagccatccggaaaggcgcaggggatgcctcatacgcgtcgagattagtggaagactattgtttcatctttctgaagacggacatacgtcgaacccccttatttcgggacccaatctggctatggctaagttggaatagtcgccattgtacccaaatatccacgatagctacatccaagttcgcctgcgagagtgcgagcggattagggatgtaattcgacgggaactaagcctccatgatgatgtgcaatcgaagctccacttctattacaacttggatcgtgaggcttgggacaaacacctccgtcaaacaatagaaggagtgattaccagggaattcgaacatctcaacttcaaccgctacttccacgacagtttggcggttcatcgaatacgggcacccactgaagacccggacatgggcaagtttacactgaccataagcatgaagccgtattccgatttggactttccgtgcatagcaaaccctactctgaagagatttgacctgcctgtgtgcgatatccgagccggctccagaacggcgagagcggctcggcatcgcggcttccgtccaagtgtcatattatcccccggcaatgcctcgtcttccatccagcccacaacaaggtctgaggagactgattctcctcctccaagctatacaggcgtcgcacctcctcccccgagctatgactccttgctcactggcgaaacggtcagaggtggatccagccaagaattttccgtcccatcagtaactctctgacttccgaggaacgatgtgatctatcgctgtgacgtcacaaagaaaatgggagacgttagtctgatggaaacacgttctggagaacacattccatagattttatcgaagatatacagtaactccttgacctaacaaaactgaaccttggatgcacacatttgctcgagatgccttttctcggccataaatttgagtcgatctatacgctggaggcgacatgatctctgttgaagtcacatgcgcactttccttctcaaggtgagctcttcgcgtcagcagattagttgtagtttgcactttaccagaacggggatggcaaaattcagcaagagccactggaagctaatggaagcgatctcgaccgagcagaggagaatgctaggcccaaagatagacaactaatagcgtaccgatgcagatgttgctcgatgatgaccaaaccacgtgagtttcaatcgattgggcttgaaacgaggtctcaagtagtcttgccatcctcagcccattctttaggtccacgtaatcgtttgggcatcaggccagaatcggtgttgcgaatcatcgaaatcacgtacaggctgatgtgaaaggatcgcatcactgccgatacgcttctcgatttgccttgccgatataaaacggatacggtacttccgggtatgagcaatcttatctcgttggatgcacgacacaaatctcatcatccaaattttatccgagaaaccaccctcttgacagtacactgatgagctcgattgcagacaaattcaaaagcctcgttggcaaacattccaatgaacgcgtatgtggactggacagaaagcaacgaagcatctacgagcaagttcgtaaagagacaatcgccatacatttctggtccatacaagatgaagtagcgaatatctcgagttcccagcccgaggtgttggactacggcacaagggttctcgatgcaaagatccgtgaggagtttgcggatgcttgtcccgataagccccgtcttcctacgaccatgcacgagtcgttgaaatgtgtgtcgtcacaaaatcatgaagaagacgggaatttcgatgtctacgcagagaccactatggaccagattagggcgaacaacgaccaggatggcaacatgcctgcttatcgcgagaaatttcacctcatgtctttgagagatcatgttaagcagttgtagaaaaagctcatgcaagaaaggcagctagaggatgaggtgaactccgtggaaccgacagatcaaatggctagcgacggaacgagcaatgagccatctattcagaatcctgccggcagcagctatgcagcaagtagtcagcgaaacaatgcgtccctgtcaactcaggacggaattcacgttgatgtagttgttttggctaacccaggtcacgagttgttgtcagacctatgtctagcagacatgagcactgaatacgggtcgttcggaaggctgaacgtaaaggaattgtatatatgggccagctttaggtgatcgatcgatagaatttcgccggaggccgaccatcacaatcccgctcgatagtctatgggagcaggtcctacatacacacaaacttccgagagcaaagcgtcctgggcctgaatcaccaacctccaaggctttgctggtcatcctgctgcacttaagtcatgcaaggatcaatttataccacttggaacacccattgaggacgcgaatgggctatggcacgtgatacatcatgatggcttttcgcgcctcgagacgcacgcttcttaggctttctctgccatcacgcctgacgaagtggacaaaggaagcgcctgtcacttgatcacacacgatttaatggcctgtacgagtcggattccgagctgttggtttcgagtatataagcggatctctgtagaccgactgaacaggtacgcataaacagagcgaggctatttcgacgcgattgcgacgtgatttctccttacaaaaagcaaatactcacgaaataccatggattgcctcatggaggcttctggcggaggcaatgccaaagagactgttctcgatcaagcgcatccatacaagatgagcccggaggaagtagatacgttctgttgcatcaggaactttaccttcgagttcgcctctgatatcatggcgtacgaaaatcatgaaaagccaggcgtcgtgttaagcacgcacttcttttggtgctgggccttcgactgccagacctccgattgcgatatctctctaccaggattaccggcccaccccgatcctcttaacgtgttccccggtgtttgctggggttacgctgcaggtaagtaccaatgttgaacgaaccgtgaatcaaaattcatgattcgcgtcaacatacctcgccttgcagcatgacatcgagcctgaacccgagcccgagccacgaccggctttcttcaaatcgactatgcgagaggacttggcgtgccctgcgctactagcggcacatagacaaaattggcctgggaatcgaaatcagacagctaaactaacagaagtttaggagggctgtcccagattacacattccacaggggtttcctcaacatcttggagccaaaatcaaactggaaacagatgaatgcatacacgtacaagtacgtgatccagatgaaagtttcctccgaaggaacaaaaatcggggaggagcatgtcgtggtagccgggatccccacattcaagaatcgaaacattgacgttaatcgacggggcggggaaagccttgaccctgatcgatctcagcgttgacgaaagcggtcaatgaggatcccccgacagccgcacaaagtacccttggcgatgtgcagagcgaggcagcgcaactgctagtcaacgaagggaccaccttcgaatcagaatctcaagacgggccggtcgttcctgccaataacaacagcatcgtcactgatcaaggtcccgcgtccagcgcatcgggttggtcagcctctggtcagcttcccaatccatgagatcgggctttgctgaaagtgggatgtcgtgtaaattatctgttcccttgactgtatagaagcctgtaaatcgacgtcatccaccctgctcgagcttggctcggatcgccttgacagccaggaagaccgtaactgatccctccgtctaacgatagaagagcgatgctcatccgccttgttttgcttcatttcgtgattatcccatgtcccggctcaacgtatcttgtacagcatggttctcaccaagaaccttccgacatactgctgcctccttcgctttttctccctcgttgctggaagtcggtgaccgagtaccgctcgcgccctcccttggccgtcaccgatcgtcctcataactgactggactgtctatgggtcctcgaaccgggtagtgggttgacgtgctcggttgggcactatctcggtcattgattcaagcggtcaaatttggacgttccgagtgtgtagatgggattgtagtcgagatttcagaggtaatccgtcgagcgggtatggtagtagaggatgaagagggcgtgaagatggtccaccaattgtgccagattcaggacgaattccaggtccgggtcgaacatgaacagacaacatcgcgcatcgagagagagaaaggtgaaaaggtcttgtatcagccagccgtgatcggcaaaatcgagtctctctggcactgacgagggaaagtagtggggatcctctcggcgggtttccatcccatggattttcggatagggggtacagtcaaggccatcagaggacctagccagtcgtacagaacgcggggaagggcatcagcgagacccgaatgaatctacgcatagaacaagaggctgaccgacggatccgagcccaagagaccagaagatgacgggctgctcgtgagccattcgttgctacacggtccgaacaggttgatgtatcagcttcccccgcgcggcttggcggctcagataagacgtatattactgaccaggtacctgtaaactcccgacatgattgcgattgaccgggcggatgcgctgtgatcgagatgaggtcgataacggtctgcactggcggttcgatatatgaatgtcgaggtcattattggcgtaggtcagagcgagatggcatatcaatcaattaaggattcgaaggagtatgaatctatgacgtgtcctctcatgacacgattttgttgataatcggatgacgtttccttgattctcggcatcaaatctgcttccgaaccgagctaatcccttgacttgaccttggataacctcgagcatgatggtgataggggtctatctcatcacttgttcaagtctagttcagctcttgcgacatacccttcaggtccgcatatccgatcttacattaataagacgattgaactatccgtccaagtcgtcagcccactgccaagtgtaaaggtatgcccgtcatcggcctgacccgttctgccctccttctcatccgcgagccggttcacccgacctgacacttccggcatccgtccgactcatcttgcccaaatccaccttgtgacctcggtatcgaacatataaagccctttactgatcaccaatttaccttgtcgatactagaaagtcattcatacgccatttatcttagacacgaaccgcctcgttagacattaacagagcagacgaccagatcatctgtccaccatgaggtgagtccagcctcccatagcattatcctggctgctagcggcaactggccatgaactgatcaactcgtctacgctaccacatacacctcgaaccctcgtcgtcctttacctgttttcggtctcacatcggtcgccgaccacctactttgatatgggctcgccaccccttccccacagctccccaaaacgaaggaccgatacggacgtgatgaagctgtaagtactattgcctctgtcttttcccaacaacctctgcaacagttctgctcgttcctcccatccgctcgtgtcttaatctaaaagctaatgacatgctgataacctcatcccttctccctctccccgtcgtgctcgctcggcgtcctgtcgtgtgacgcaggttgatgtcggattatgaggtcaacctggtcaacgatagcatgtcggaattctttgtcaaatttcacggacctaccgagagtcagtttgatatccgggtgttatggggggtggatgaggctgatcttgaatttatgcccatcttgaaccccggtcctgtgctcggcttgtatcgttcgaatcgccacctccacttctccaaatcgatctcatcaacaaatgtgcctctatctctatctcttgtccgtgaaacgccgactcgacctatggtagctcccttcgaatccggctgctggaagatccacgtcgaactccccgctcagtacccttacaagtcaccctcgatcgggttcatgaaccggatctttcatcccaacattgacgagatgtgagttaatgccccttgttggcttgaaagccttgtacggaaaggcgcacagctccggaagaaggctgatttgcagtggtctgatcccatgacggcttcgatagaagcgggtcggtttgtctggatgtgatcaaccagacttggtcaccgatgtacggtgagtcgccaagcctaccagataccttcagaactatggagacattcagctgatgcattctcgtctgcttagaactggtcaacatctttgaaattttcctacctcaacttttgcgatatcctaacccgtcggatcctctgaacggcgaggcggcggctctcctgatgcgatctcccgaccagtacaacacccgggtcaaagattacgtcaagaagtacgcttcccaggaagctgcagagaaagcgggcgatgagaaagaggacggcaagacccagggggcagatggtgagagcgacgaggacgatgaggacgaggagatgagcgatatggggtcgagtgatggcgaagaagtggctggtggattggacctctagtccggaccatctggccatcgcttcctatctcgaccttgagcttctcctcacctcttctcccgttgtacaattccctctacaccccgcatcggttctcggatacccgggtatcttctctcgactcgcaagaccgactctccggctcagaatctctcgacaacgtataacaaggaagatcgctagtctgcaattcagtgacgaggtcgatgcctacttctctcatcggttctacctgcagtattccggacccggcttgtatcattgagtctaatttgactgcagtttcaattggaatggttatagtataaatggacatcattactcatcttctctgtatctacacgtttttcgtttctttggggctttatcctttcgtgagggtgttcgtaaatatgaggtcagaggatttggcaggggtaaggccggtcgcgaatgcagcgaaccaatcagctgtatagagcgagattgtcgtgcgcaacgactcacagcatgcgtctgccgtggattgcctgcctctaccgaacagaacggaagctgaatttgaagttcagagatcgacttcaacgtagggaagaggatgtcttcgacctttgatcctataggcatgcggtatagcggatgaacttgaagtcctggcagttgcaggcagagcgaatccatcggacgatattccgacacagagtgagcactttggacgagtactcggaggcttccgtattgtgtgggctctccctcaaagtgaggtccgcagtgatgaccaggttggaaattcccggtgccttgatcggtttggccggcgcctttcctgctttgagatggaggaacaagtgcgaaaccgtcgagggcaggctaatatccatcatgtagcccaattctcgcgtctcgtctttcagaatcttcaaattgggacacctttcgatgagatcctttctttgctggatagcatcggatcgtcgggacgggtccgcgtcaagaccaaggagtatgatatgtctgctcacactgcggaagaagaatcagagataggtcctagacctagaaagataggcaagccattgacttgcttgatgtagcgaaagctatccttccggatttttgccagggcctcctttgctgcgttcgcacggctctcgatcatcacggtatgcatcaccagatcaggatgatctgccgaaaggtatggtcgaccagggacatggctttcaaatccggagaaagggggaacaggttatagacggtcgccaatggcttcggcgacggacacagatgatatacgattgagtcgaggatcggcgtcggcacatggtcaagagaccacttgctgagcggagcttccggtccaatcatggttgaatcgtttccgttagcagaattactgatttatgttccgcacctgttgcttgcgagttgcaacgcggggagaccataagacaggtctagctttgaagtgattggtaaactttgtcgtgttccacatcatcaagtacccagctggcaatgtgtcgagtgatccgaaccgggtgtcgtcgttgttttccttgttgtccgaaacgatgaaacccatcaaattcgttcagcttttgatggtccgacggtccgattcggaaacataacgatatgctctagtcagctttacaatgcatgctaaattcaacagatcgtatccagcgcatgcactcctcccttggtttgattcgattaggttagtgtacttaggtagtcgctggttgttgttgttgatgatcactcctggccccggaagtatatcgattgaatcggaatcagattgaaagcaacgttgtccggtccgaaacgacctgctgcactgctgtgttgcagctgaacatgcctaatatgctggagaattcaagtcaaaagacgtacctcgccgtcagcctcgacataaccaaagccgagtctgatcacaatgactgagaccgcaacatcctggaaactccctgtagaacaattctcgccgaaggacaagggcaggtaagagctgacacttcgttgcggttcacagagtagaggctgatccaaaagcctgatacacttagctttgcgtatgttgtcttctgattctggcgtcttaacggaagagaactcattttacctcacgcattaggtatacgaccgtagcaaaacggtcagctccgacgtggttctgaacgactagccgagctgacacaagatccgcccagatggcctaccatcctcacccaaatcgtctcgacgctctcaaacgagctgcacaagataacaacatcagaaacagactcgcagtccgacgagaacaaacaaaagatcgaagagggcaaggagatcattcggtctatcagcgagttgaagcatgatatgggcaggaacaagacgttggcgtgagtcggcctgtccgacgagcagctccctactcgaatgctcataacctacgcttcgcagaccaatcgaggatgacggcggtgcgaacgtggactgttacaacgaacacctgaaagctctcaatgggacggatgatacatggttcacgaccgcttggctgtttgccgaatgttacctgtaagctttacgtcattcgggatttcccaccttctatcgcgggtggagactgaacgtcgggtcgtggcgatctggctcgcagataccgactcttgaggacttattttgccaagaccaagtactggaaccaattcgacccgttcttcggtcagaaagccgacacctacaagtcgagctcgactgctatcctccgtaagccggatttgtcgagctcagtcatgtcacgtaactggaagttgacctcaaatggacgatgctagacctcgcaaagagtctgaaaaagctcgatggtgaacaggaagatttgatgaagggataccaggagaaaggatccgcgatggaagtggtcttctagtgggtcgaacgggacgctcgggaagccggcggacacctgacgcggctcctttggccttgttcagcgaaatgatgcaggcagctctttggggcaacgctactgtgagtacgaaggatgatgccaacgactatcacaaataatagggccaaatccacgcctttcttaccaggacttatcgctcctggtcgacctgtcgtactcggacctccagaagctgcaagagctcggctcggctacacaagcggaacaagccaaatttatcctgcggaatgatctggaaaaggtctgggcaacgatcaaagacgtcaaagatggaagggttgatatcgtgctcgacaatggtgggttgcaacgatcaaatggtgatgattggccagaagtctcatccattttcctgctaaaatacaaacagctggtttcgaggtcagtttcacatctgagctagagcgctatgtggtggcgaccttgaattgaccggagcctatcctacagctttataccgatctcgtattggcggatttcctattgagaactccttgtgtctcagaggtcgtcttccagtaggtcagacgacctacgtgcactttcatgagcagtgctgacatactaagccctattgacagcccaaaaaacatcccttggttcgtttcggatgtcatgcctcttgacttttcgtgagtaccactctgttctgtgagagccgaccggcagctgactcagttgacattgattttccgcagatgggctatcgactctctggcagatcaaactttcttttcgcaacacaccgaaggcctgaagcaagatgacctggacaccttgtcagctctttcagtgaggtggcgcaagcacatccaagctggtcgcttcaagctctctgtaccgctcgacacacccatcggtcacaagaccgaaatcggtggattctggaccacacaatatccttaccagctgattcccgagaaagatccgaagttgctggaagaattgcggaagtcaaatttagtaattcttaagggagatctcaattacagaaagtgcgcacgcttcggcttgagaacaaacacatggagtcttgctgatcagaactgccgcaacgaaaacagactcgtggctgatggtaaatgggcgcccacgacatcattcgacacggcgctaggaccattggcgggccaagtcaacttgctcagtctgcgaaccaacaaggctgatccaatgtgagttacgtcaacttgggaagaacttcaaagtctaactagctggaccgcctttcgtagtgtcggtctccccgagagaaccgccgagcggctcgacaaggaacacgagagctggcgagtggatggcaagtatgccgtcgtgtcgttctcgtcgaggacgcgatgagacaaatgtgagcaggaagcgaattcatatggaataaatgccaatgcccgtgcatgaagacgatgcgtgtatatgccttgatacaacggagaattaaagtaaacgcaagagcgagcgaaaccgaattatacgacgcgaaaattactggcaggtggctaggcgtcaagcctcgcgagatatataaacggcagattcacatctagacctgattgtcctgagtgcgtgtgtaaagaacccctccttgcagacttgcctttctccgctggcggacgacgatgtcacgaggcgagcctggtggtgagacaggcgtgatgggagctcctggagataagggcgagttgggccacagcgctgcggatgaagacgacgcctgtcgacggtcccccgtgcgcatcgcccgagcggaaggggcgaatgtaggagacgccatgttggacggatcggcagcaggccgaaccggagctgctcgaccgagcccagattcgcgtgagtatggtgatggtgacggtgatggtgatggtgcaggcgaactgtccatacgtgctttgactgccccaatcgccgacgattgaggagcccgggatcgtatcggtgtggcatgagggtcgctggttgttgcaggcaagctcaaaaaggccaatttcccagtcggtcggtcgagcgagagcgacaagttgactgaagaagcggtcatcggagcacgggtagaggtccgactctgcgaaagttgcaccggtcctgtcgtacttgtgttagccgaactgttgatcgatgatccggccggtagccttcggacgacgatttcccatcgcatcgtctcgccatcggcgctcggtacgcacaccgtctcgacctggaactcttcctttgtatcccttgcgactagtcccggcgaccgtggtggtgtcgttccgaccgagaacgacgtagaggaaaagctatccttgcgtggcgagacgacgcgttcagcccgggtgataatggcatcctcgacgctggacagctgttcctcgctatcgtcatcggcctcgactcccgaagtcgagtatttgcgatcttccgaatcgtcactagcacgttgcttaagatgtgggagttgttgcaggccattcgcttgggggagtaatggagccggtttcttcttggtcgtccgctcgtcaatcggcctggcaggtccgaacgaaaactcgcgggaatgatgatcgaatgacgaacttggtttgcgggacaaccattcgacgtgactcgggcttgttctcgattcgcagggagaaggtgcacggaacgtcgagccttgtccctcgccggccgacgtgtaaacctcgaacgaatcctttcgcggcggcgggtgcctgggcgatagacagcccgcttcgacccctcttgagggccacgcaaagggggcaggtgattgacccgattggcgagagacgacggtcggcctcctcataggcggggacaatggcgtcgggtaggtgttattagcatgcgaagtgccctgatacgacccgctccgagtttgagccagaggggtcccagggatttgcgctagttgggtacgttcgggtgtcaccggtcgctggatcggagcagtattgggtacccctgtcggcatgaccctcgaggcgagtttgaaaacgcccccatccttgtcctccaacgttccggacgagaaactcggcctctcgccggcagtgaacgagctcgaacgcaatttgagcccctggtccaggctggtcgacctgacatccttgtgaacgggctcgacggcagagttcatctgtaatcgaccaaactcttgcaagatttcttcctgcgaagccttgaccatcggtccgatcggggccgagatgttcaacccggaagtcgacccgcttggcttggtcgagctagacacccgattcctgaaccccagtttgaagctcgccgaccggttgacggcgggtgttccaaagacgttcgtgtcctcttcgatagaccctcggggaggcaagctggacccttgttccggttctttcgtcgagaacggattcgagaggacggaagagcccgaccctaacctcttggtcctcacttcctgttgcccgtgcccttctgacccggtcgcaccggggacgaaaccggcaaaccaacccgcccgccgtttctcaccgttgttgctctccgagtaacctctcggtttgggcctggcccgtggggaagggggaggcatgtccgccgaaaaggacgggatggacaaggagaggtggtgcgtgtgcgagtgtgaatgcgggttgctcgtcgggaacgacctggaaggggatgccgaacggggtccgacgttcgaggccaaccccacccccgtgatcggttgcaaagagggaaagaccgacacgttcgaaggactcgagaaggggatcccttcggtgatgctcgacattctcctcccacccgttccatcctcccctgcggacccggggtacaaatcgaccggatgtccgggtccgggtctggtcggggatgcacctcccgatccagagccagcggggtgggaagtagttgtgttgcgagagaaccgggattttttccctccgcgggaccaagatcccgatccgaaccggctaggaccttcccccggctgaccggacgtcgaaggatgttgacttgcagtgttcgagccgtgcaagggggagggatctgggcctcccatccctgactgggacggggcattcatcccggcgggggataccgtttggagttgtgttcgaggagaaggaggtgttgatacccgagccgaggatgatgaaagttgtgtctgagcttgcgatgacgatggaggcgacaacgtaggctgtgattgattctggctttgattgtgattccccgagttcgagttcgcgttcgaattcgagttcgattgcacagccgtaccagaggaggacgagcggaagaacgagagaggtggcatcttcgtcgtcgtcgtcgtcgactctccctctcgatcccccacgtacgagctctatctctctctctcgtctagtaattaatacctggaagacgtcccgttctgaccctcgtcctagtcccggctgatgaatctctttaattcgcaagccttccaaatcggatcctcgtcctgatcattctcaaccgcccggtgttccagtccagttctacctccaggagcgatgatacgatactgcgtgttcttgatacgatcttcgttgtatatgctcgatactccggacgatgtgtgacgaccagccagagaaaggagacgaggtgtgatactaggctgatcgacgttgtccttgtggtctcgtcgtcttcgtcgtcagtgttcgctcgttgatacccgcccgacgagtagcgtggatcctgttacttgaccgacgtttgactgaacgaccacgttttcagacgaacgagtgaatatcctctgacttgatcgttcgaacccgacccgatcggtgttcaagagagatgtcgagatgttgagatgagcaccggtcgacgtcgacgtcctgttcggccgcccccgtcgtcgtcgtcgtactactgtagtcaaactgacaagccccggggatcgccaagtccggaaaagcgtgggcaaaagggtcgacactcgcaaatcgatggatgaatggatgatgctaacgtgatcgtacgtgacacggtgcgggtggggatgatgacatgatcaacatgagacgataagagcacgaggagaagaggaagaattgagatatggtcatccaccaacctctgatctctgatctctctctcgattcgggcatgaatgtgtgcatgtgcctgcttcggattcttttgtgtgagcgagggtgtgtgtgttgacaaagttggcggtttgggtctcggttcggcacggcacggtaaccgggatgacaagtcagacacacatcatgcgcctcgatcactccccctggctatcatccatgacccacctctgtctaccactactgctgtacgtcgttgtacactcaactttgttgtattacatgtactttgtgagatgcatgagatgtgaatcggcgatttttggcgcggatcacgtcgcttctcgcttgcaggtgggatgagtttcggatgcaaaaaaaggaacaagtcgagtgcccagaacaggccaggagggcagggaagggggaagaggacggaccgtttgtagtttacgccaccagctaacaagccagccagctcgacaagagacgaggctacgaggctacggacgccacatcgcgcatcgtcaggttccgtgttgtctgcatgtctgatcaagtacgatgatgatgggatcaagggtcatcacctatcacctagagcacgtacccttttcatctatcaacgatccatcggatgggtatcgcagctcgaaatcgacgtcccggagaacaaggtatctccccgactgatgaaatgaatgaagaggtggctctaggctctaggaaagcgattcccagaccaaagcacacccacgctcggagaaacgcacgaaatgacgttgcaaacgcgcgagaacgtcacatcagggccgagacggcggaccccttttcaggtcccggaggcggcggcgtgggaacttctaggctggggtgatgttgttatttccacctatgtgggctgacatctatcgggttgaaggagggtggtgtacgagtgtatttccacccccgagatgatccacccgcctggatagaatgtagaatagatcaacctatctggaagcttgaagcgcattgtgcaagcgcataatgcaaaggggaagtttgttgaccgcccaccaggccaccagacgtataagatcaaggaccagaccgcgcacatcgccaagacgcccgaccatcattatcgcactcatgcaacctattcacaaacccgctcgacgacgacgggacagatccggtgatgcagagtctgcctgggtccagagcggtcgatcaccgacgactagacctcggggaatctaggggtgggaaaccgaaccgtgagcatcttttcccgtccgtcatcccttctccctatcctcctcgtcttccctgtgcggacccgcccactcctcaccgaatcccacggaaacatcctcatataactgagaaacctaaacaaacgcaaacgagcacgagcacgagcgaaacaaaattaaaagaaggctccagtgatgacaccaatttcaagctaatcgtattcacactgtgcgactccccctcgggggaggatgcgcgaagcgaaaaattacaacggtatctgagacctcgctctgctccctttctggtgttcgatgtcgacgtcgacgtcgaattgtgccttttgatgtggatttggaatcgagttgatttggacaggacaggacgctgatttttgtttcatcccattcgaactcaaagaagcacaacaaacttgaagacactccgcctgggcccgatatatagggtgtcaccgagacatgacaggcactcgagatggtaagtcgacctgccttgccttgcctagctagatacgagaaacgtatgtgttgtgggtgtacgtgtttgtttttcgtacgacgtgtattgtaaaccgggtgcgacgggcaatggattgagtggtcatgaaatctccctgaattggattcgcctgaaacctgagctcgacttgttatgggtcggtcaaaatcaagcgttttgtcacgccgcgggacatgtatgtaagttttttttgtttgaaggggatgtcagtcgtcgagaggcgattatcgatcatcaacgacgacaagcgttaccgcgctgtctgtaggaaaacacatcccgagagccatccgggttgaatatttcctgatccttcccgatcatatgagatgtacgggcgttgaccttgcctgaattcatctctgatctctgacctctgatctgatcgaattgggtgatggatgattggcagtcaatcagtcgtgattcgcgatttatgaaattgaatattcgaaatcaagaaatcacacagaccagctagctaggtccactcgatctcatgcagctcgacaacgatttcatcaatgacctcgagagttagatagcaacccacagtctcaccctcagtcaaccttgctctagctctctcactctaaatccagtcctcaacatgttccgatcatctcgtattctcttcagcgctctgcagtaggtcccgagcaccatccaccgtcgaccctcacgatcgactcgacgctgacccggacccccgctcgtctagaccccaccgagtgaccacggggatcaccggtctcgccgtccacccagctcccctccctcatctcctccagacgtacaaatccaccctctcgatcgtctcgaaactccccgaggaatccgtctaccgtcaagccacccaggcgttgttggagcatcggacaagactcgtctcgtcggccaacgaggacgtcaacaaggtggaaaaagagattgatgagggcatgatcgagcaggtcatcgagatggcggaagacgagttgaaattggcaggcaagatgttggaatggcaggcgtgagtggctcgacagtgctagacctcgtcgacctcattggatcccgtatccagagactgataatatcgatctcgctcacacctcgccgtcttccctccttgtcatcgccccctgcgttctctgccatccgaccaacccacccgtcgacagccacgaacccctacaaatcaaaccctcggcggatcaatgggaaccgatcggtcccgagctcggacaggcatttggaggcccccactagacgcagacatgatcgtgtcgaacgaacgagtgggcactatgcgaggtgttagatgtcggatggatgacgtgcgggaaacgaacgggtggattcgggtgtatagtcgacgagcatttgtggttatgggaataggaaatacgaaaactcgggttagcatcgtctccctggcggtcaaggaaaagagcgcacgaggcgagcgtcgagaggggtctttctgtgcacgacgattgcggctggtagagggaacgactcgcgggcacgtcgaacctggctcacacgcaagacgtggactggtgcgcttgacggacaaggttgtcgtggtactcgcacagatatcaattggagatcaaacacaagagctgcgatcgaccttcgctttcttccggattcggagcgaccttgagtgcactcatttactcgatacaatcgccgcgactcgaagtcgggacacacgaaccccttgaaacccctcataacgtccatcggaccttctcgcctgacctatcatcctctcacctaagttttcttccaggtccacacctgattcgggttatcatccccacactgccaggtctggacgacgttgccaggccccgtgtctccgtttcgaagattcatacagagacccttgtcttgcacggcgatccggttgtctccggtgtaccaatactgctgctgcgacaagccgtcgtagcattgccagatcttgagggggacgttgttgccagggtctgtaaggtgctgatcttaatcacaagatcctacatgtacctcacacagtgactcgtgacttacagctaccggcgtcgagacaaaagtcggtaccattcagtcggaccttggtcgaagccttggtgaacgaccacagttgtgcgggcgaccgatcgcaatcagacctgaggattacaggtcacagtcacatttcggcaatggcaacattgacaagcacgtcagactaacagtgagacgggctttccgttggtgaattccgcatcagataccgtcaggcacttggaacctgcggccccaaagcgaatctcggtcgcagccgaggtcgttggcgggaccggtttagtttcaggagtaccgccaggtggccctgttgccggtgggtcccgcaacgaagcattcgcgtcggggaggatatccgcaaaggtatcattcggatcgtacggcctggagcaaatgacctcgagttctgaaacgcgcatcagccccgtcgccgcttcaaatccgttcgaacgccttttcctcacctttacggatgttgggtcggaacgcgagtacactgcggacggtaccatccgcagtcgtatacattgacggtttgatagcttcttcctgtcgaccagcaatcgaccgggcgcgcggctgtttcgctgtcttggtgcacgcgtcgaaacggaactcgtagtagttcgtcaacatctttgaaacttgttcctgaaaatgtcgcgatgtgagcactcgaacgatccgtaacatgtcccgacatcttacgccataaaagaagctctcatctctcgatcgcggagcataactcatccagtttttttgctcgcgaaggttcctcttgatccgttgaaaaccacaaggtacctgcagcctagacttgtgactgtatgtcacgccttcgatctcgtattccgcttggctgtttcccaactctgttcagatcaggccaagatgtgtcacaccagggtgcttacgggaattgaggtgtatctccaatctaggagatgaaagggatcattcagcaaccgctcaagaaagtcgatgtctagcatcgctcaccccgtcatcttttttgcagtctgtgccatgtgggtgcctgacacctaaccaatgacctgatggtatcgaatttcacgaggtttaggagtgtttctgggagctcgaggagcaagatactgaccagcttcatgtcctgcagtgaaaaatgtgtctgtatcattcttgaagtattttactcccggcagattgtcaaagagcacgacgcaaccgtcgtacccggccttgtccggaaatttacagaatccgcctggcctgttcatgtcttggcctttgataattctttccaccagattgatatgcagatcgttgagcggaccatggcggtagctgggcttgctcatctccttggtccaagcagccgagtccttctcggtgatctacaagtcaaattggatcagccaattcgctgaaagatttgtagtcgcaaccgaatggaatcataccagagtaggtcgaatgagcgatccgtatttcttgccccagtatcgataaatcccattgttgcgtttcgccttagtgaaggtaattccatgtcgctctgatacagcatacaggattagcgctgtttagaagtttctgaacgtgctttgcagagcactcttctcactatacatggtgttcatttcgtctatgataccctgtgccgttgattctttgattcgactctggcttgtcttgagccacgtaaagacgttgaagtgaacggtgatcgtaatcttggggggctcgtaacaaaatttggggactacagccgaaggcttgtctcagcctcacgacttcaaagcttttcgagaggggtcaaagttacctttaggaggtttttgctgcttgaaaggcttcttgatcgcttcgaacacagctccagccgttcccccgatcttgggcagatcgggcaatttaaattgtctggagtcatgttgtccacgtcgctggaactctggaccgccctcgtcgacggtcgcatcaagtccacagtaaggtagatctatcccaagcgtttcatagctgtgtcagccaagactacatacttttcaatcccgtgtgatcgttctatctacgcaccaacgggctcggatccgtctgccgagagaaaactctgcgatttagcgcaacaagcgacatgtcgtgttagctctgcgactcaccagtcggattcttcatctcatcgaccagatgcgccacttgtgccacttggtaggcgaacaattcttcgtcggtcaattcaggatcctcatcgggaatgaaagcgtcgtcttcgatgggaccggtgctgggagcgatctcgttcgggggaacgatcacatattccatctcgacgggttcacccgagtagacgaactcgcttggatcgatacctggtaccacggtctcattctctgcagttccataggtaggtccaaagaggtataattcggagtccggctcggctggaacccagaacttagcggccatctcagtcgacccgttcgaaccataccagcggcaaactcactctcagaggtattaatgactcctcgtcgatggtatcctgtcgacgaataactgccgcctgggtaccgagcccagtgaagcacgtcaagatataccagatagagactaacatcactgtcttgggtagcatagcgacgtttcgtgagttcccacgaccggtcaaaacagtgcgttcagagcccaactactttcgctgcatcgcaatctcgctcgcttatataagcatttcaacacaaggtcttcgctcatgcctgcatagtgctgatcaggtggtcgcatcgcttgagtccaatcatcctggcccgcgggctgtccatctgcgtgatcatttttcgaagttcggtcagatgcgcctgaacgctgggtccctcgaagccgcgattcagataggaacggtaactgtattcatgctttcggtcggtagaacaaattcgaaggaacactacagcatactttctggccgtccctcgccattcgaaaactgctagaagtagctgacacgactttagctttccgtcgcttcgtcagcaagcccagcccaggtcacgcgcacacgaagcgcatccggttctcacgtcctcgtctaatctactctacacagatgatatgagcgatgggccggggcgggactatacatgttctcatgcgggcactaaccttgaagcaagcggatgagtcaatgattcccatgttccagcggaagacagtgaaacctaagcatccgatgagacgtgtagctcggaagggggctcctcgcttggcacacatgcttcagaaccttgtgacgactcgcctcgcacagaatcgtccggagtgcggctcttctcgtgtgatacgaggaattcacggctgagctgtgctgcgcgaagatcatgggttcagggcgtcgacattactttcatcgtcgtgtgctgactttctcgcctctgagccgctcgatctatacactcgcgttcagctaaagctgtgtggacagccaagccaacaagaccgtccgtgaagcaagagtagcaaggatcatacgcaaaaacgcgatgcattgttcacgaagcgtgatacgccttgtttcggctggtcagcgagcgaaaatgaatcctgaataacgacccggaaagactgtgcatcgccaagcgagactcgctacagcattcaaatgacatgcttggagatcctttgataatttccgcaagatgcacatgaactcgatgacaattcgcaagactgctgcacatctaattgggcaatctggcaccttccccgatgttctgcttcgagatcaggtcgagattcttggttccacatttcagcactgtcctgttctcgtcaggcaatataagcctatccaaagcgtccgccacctcatcgagctacaagacgtccaacatatcagctagttgaactgtcggcgactcgatcgagttgatcaactcacctgatctccctcgacccaatgccaggtcttccacacgtcctccatctcgtttttgagtgatttgacgatcctcgctctgatctggctggtcagaccgatcgtaccccctgtacccatcttggtcgttcgtcgggtctcgccatcatgtgagatgtttggcatcgaggcaagttgcatctgggaggggtgtagtcaaagcggtcagccagaatattaggaaaagtaaagatgggaataatgctcacagtgacgctcttcaactcgtctgccccgggtttcttgctcttcgcaggcccgtcgtccgcatcatcatcgtcctcggagccggaatagtcatctcctccccttcttttacgacgagcctcttcactcctcttcttcttgtccaaatcatcgaggtatccgagatcaggacgaagctggacgagcttgttgatcgggtgaacgtggagtgcgtcttgaagacgtctcgagttagcagatggttcgaaaatatgcaggaaaccgagacggacttactgtcgtgcacgatcccactccagtacccagtgacgtgtggaacttcctcgctcctcaacctcatcttgctaccccacccgtccgaacccatcttgacctttttcttatcctccttgctcgatgccccattcctgccctggaaacccatctcttccgccttttcctcgtcccacacatcttccctcatatccactgggacttcgagctcgaacctctctacagcctctttcatccgggcggtaattgtgtgccccttggattgggcataaggaggtacggtgatcggtcgatgatgtagcgggtattggaacagctgcagtgacggagcgagctgggccgataggtagatgggaagagtgtaggcaatcgagtcggatgggtcttcttcttgtaaagaagcgaggaattcgggggagaggttatggtgcgggtcgttggagatgtcgaaaggggtcggaggggtgaatgaaggtccggcctccatatccacatccgctcttccctcctgctgcctgggtgacccggaaagaccaccagagtgctcagcgtcgacctccatgataggctctaatcctgctctagtgtttcggtgctctttatcgccttcactagcttgcaagtctcggggagggctggcttgttgaaggaggtcttggatttgttgccgatcgacgtctcgcttctggctcggactcgtcaatgtcctgtccgctgtctcaacctttagagaggattttccgggcgtggatctgactttcttcgtcgaagggcttcctagcaagtccttatgtcgtggggtcttgggtgtcgagtgtttccgagagggggaaggcgtgtggacgtgagtcgaattgcaacaacggcaacgccaaacgtattgcgattgcggggtcgtaggcgggtcttgttgagtgctcgtgggggttttgggcaattcagtacctgcctccttgttcttcttgggcgtctgcatctatcttgggccgatccagtgagaacaggaagaggttatgagctagttgacaataagttcgatttggccatttcctgatttctgctcgttctttccctaaaattctgggcgtcggacttgagcgaaactcaaaagttggcgaacagaacactttgacaatcatgcacctcacacagaccgacctttgacgctccttgcttaggctctgcaatctcttcagaatctgcagggcgatcaaagtgatattttgacagcatgccctctgctccgtcgccgtttcacgtcctgcggcatcaccagtctcccttgcatcatgtcgcgttttcgcattccaacgaactactctattcgggcgacgaggaaggtaatatcgccatcacggacctcaaactaaagagagtcatctcgtcatggaaggcgcatagtgaaggcgtgctgggtgtcggcgaatggtacggcggtctggttaggtgagtcttgtgcagttagatggggaacgatggaaaacgagctgataaagggaaggtgtacgaccgccatatcgacgtcctcgttcaaaagcaaagtcaaggccgtgataatgtgatacatttccactctcctctctcgtcgacaaatacggcctcttcgactgcttcatcttcccataatccaggagaagaaggaacatcgggaaccgtcgaccgaggcccgtccgtctctaccgtatcgaccatccccacaatcacaccccttttaccaccgccaacgattctcgactcgctgccgacaaactcgctgaacttttgcaagttcaacatactcgagattcctgaagagatttgtttgcctgaaggtgtcatggaccgaatggggaaacggagacgccggccggacgattgtcttgggctgaacaaggggaaacaaggtctactggccgtacccaacttgatggattccgactcggtaaatccgcataatggcttcggcctgaaatcgatgcgctttgctcatgttcttacgcttcgtctaggtcgacatataccacctcccaaccctaacccgtctacatgcagcgttcaccagagacgcaatcgaaaccatatccaccccggctgtcgcggaaggccagaatcggaacgccctaatcatgggcattcacatgtactttttcgaggacagattgagaactgtccttgcgttcgaggatggccgggtcggattgtgggagtgcagagactgggctgaggagagcgatgtgaggttggacaagccggctggctgggtctgtctatggagggagaaagggcacaacgaggccagtgagtctacggggtctgctgggagtgttgtcgcgaccgagactagctgatcttcgtatggctcgcacggtagtcatggcgatgacggtctctccgagactggattttgcattcaccgtttccgctgatcaccagctcgtccgctacagtctcaatgtgagtatggatgacggaacatgaactacagcccatgctgagcttgtttattcaaatggtcataggaccctgaaggcgatactacgacccggatgaaaaagcacgccaccaaacagattgggaatgccgacgtcaaggtcgaccctaccggcaaaatcgtcgccgttgcaggttgggatggaaggtgagttgcgtgcctggtgttgacgttccgcagcaaatctcaggcttatattccccttcagtatacgattgttctcgatcaaatccttcaagccgctaggaacgctggcttatcaccgggacacgtgcaacacgttggtctacccttttgctagcgagagcacccgaacaacaaattcgaatgacagtgacgatgaagagggcgcccccagactagatcggggcaaacaggacagggcgggggggtggttaatcagcggcgggaaagataggagactagctatgtggctactgaaggattttgctaggagatgatcggtcgttgacttgcacgacgcgattctaagcaaggacaatctatatcaagcgacgtctcggcccaacggaggtgcaggaagattaaaagtttccgtggctataattcaaactgtaaggtgaccttcattcggctgacaatataaggcagacgtctgtcctggcttttaagtcaaccgaatgatcatcaggctatcaatccgggaaaaacatctgagctcgcagatcggatgctggtcgtccttccattccccacttccagctgtgatgacatgtcggggcaatagtatgaatccacatgactctgccatttatctgcagagtcttcaagtcccacatgacttgtaacagggtgacactggggctgggcatgaaggctgtttccaagccacgtactagtatggtacgctattcaatcggcaggcgcgtgactatctctctcacgcggcacttaccgtgggtagacacgtagacattttgtatcggtcgtcgaacttttcgctcacaattgcgcagtgcgcagtagaacgtcggtagtagggactctcgtcaaggaaaaggtctttttacctgtgtgttctcactgttgcgtatcatttggtatcatagtgtccctttcacatcgcaaggttcgtttggaggcgaattcagaaggcaacgggaggtgaacctgactggtaggatcaccctggcattctttccggctacaatcaacctttagacctgtctttagatgccgtggtctcggtcgtttccttctgaaagatttggagatgcttccgtgacccccgtgggaagcacaggactgaggatggaaattgattgagagtccccagtcttcgcgtcagttgtctcttcgcggtgtcgccgcagaatgaacaaccgaatctaagaacatgtcggtcacgacatatgtcgcaaaattgtcacgaccaaatcctgcggggacaggcgttcctcgcgatgagagggacagcagacttacctttgagcttttgtagatctccagggactgagacacgccaacaactgatgcaactgctgagcctggttggactctcggtctggactacaggcgatctgattacagctgcccataccgcgaggccactcgcagtgttcttccattttctctattgtactcatcgatccacaaccgagctatggttgcttgaatcggctagcccacacgacatgaattcagtgagcgcggcaggccactcgaaaacaaagtcccgtaagcaaccgctccagatgggactgcgaaggtcctaacgtaggctaaaccacgctctctgttgcaagatcattcataccacctctacggacatacgttcctgtaaaagctgactgctcttgaggcttccgtccggccagtaggagcgaaagcacaatctcgccttcagtaagctatgttgaagccactcattatggtctaccacttcagttcttcgaacacggagatgaaaaaaaaaactgtttttttcccatgaatgtacgggttgggttgtccaggacaacgacgtcactctgaatttttgatcctgctcaagctagcctgattgtacgaattatgctcaatgagcaatacaatgagtgcagggttcgctgtttcatatttttctattccgacaatgtcatatcttcgctgagagggaacaagaagcttcgagaccgggaagcaggacctgtcacaccgagtttcgatagttcctccgcttcgaaagtgaatgtgtcgggcctcgtcaccgagaccaaatggatggttccgagcaaatcttgctcgtcatagtcatcgaacagccaagtatccgtgctcctagtatcctcgattttcttacaaagctgtggcaacaggatcactcgcacatggtaatcgtcgaaagtatttggactggagctagttcgtaagctccatttgaggttgacgcgaaggatgccaatgtgatagtactttctgtcttcgtttctctccacggggtcgtccatgcggatctgacaaccgcaaaagaccaaatcccatctctcctttgcctgcgccgattgagggtgctgagcaacgatttcctcgaatgaactcaatccgtcattcagatacgcgacccagtcatttgctacttcatcagcaactccgcctttcatgagatagtatcgaccaagccgagtgacgctttcctcccaagatctggcagctaacatcgcagcagcatcgacgcaatctttgcccaacgtcctcaggtcaaatccacccttagaggccaaagcttagtcagtggtgaggttggatatctcagacgtcgtctcgtttgtacagtccgtctccgtctggaagtatttgcccacctcgcgctggtctgattgtgcagcatcaggttctgacatgactgattgatatgttcaaccttaagaagttgactagcatcttcaagttccgcaaagcgattccggtcataccgctcgctgccatccccttatatacaaattgcagcatgaacgttggtgatacttaggcagacagcacctggattgcgatcctttcattctgcatcacgtattaagacgggctactgtacgcacgtgatgcgatatgctccttcatgagatcgtatcacaacatatcacgcaatgtgatatcagacttacggaatcgccagacaaccaagtcaaaggcggtgaagatcaggtgatgtacgcgatccggagctatcggaatgcatacagcagacttatctgacgggattacttgcgactctatttcaattggattacaagactatcttctagtggtcgctaatcagatgccacgtagaatgagcaagcgaattacagcagtttgccgaaccgggcattcgcatagctggaagaaacctgaccaagctattggtgcggacgggcagtcctcctttggctgcgatgatgaggacaaccatcttggctcagcactttcagtttgctactcaacttgcgagctcagtgcaaattcggaactgcttgaaatctcctcgattccccaggatctataatcttccggagcgaaacctgaagacgttggagccacgatgctgattgagattgaaccttcgtctacctggctgatacagtgactgaccacccaatcctctggattaatacagctttggtcatcgcaatgattcagaccgatcgggagcaggagaatcctcgtgaaacgttgcaccgaatcaatcatcgccgggtggccaggggaattcgagggccagcgcatgttgattgatagccttcggcaagtcaatgctcggcgaccggcaccatgggggcgcgcagcttgtccatacgtatgacacaggattccaaatcttgcaaccagcctctagttatccgtccattatctccgacgtcatttgcgtaaccagacctctgataccgagcctttccgtactgtacgactagattgacaattcggttatctccaacggtctcgaaacgctcttggtctggcttccagcgacttataatggattggactagagcatccgcgatcttgttaccagctgtctcatgtcgatcttgttgcgaatgggcaacgtcggtcgctatagacgcctctgatgtcgacgagttcatgctccgtgatttcacctccatagagttgggtgcttttcaacgaacggaagtaaaagttacggctctgtgattacagcttggatgttatcgataagtaggtgcgtacgtgacgaccctgggtgcatatcgctcctttgtcatcgctttgagaagcgatcctgggcgtggtcgagaattcggcgcagtagacgaggtgaaacgccgagcgcgcgagagttgagcgatagttaggtaataacagatatcacgtgatcttgacttcccccgttaaatgacgtcaactctcgcttggggaattctacgggaacagatcgaaccaaaagtcgtaggtcggtctgcgtaggtagtcgtcgcaacaggttcagatcgatggagagtagctgttcaccctgttcaccctgtagacttgtagtctgttacatatttccagctaccttcatctctacaccagcttccgacatactatcccaccagacctccgagtatcagcaatcatgaccgtaagcagacctaataagcagacgacctgaactcgcctgacctacttacgtatcatgccattgtacagctctactacactagtgagccgctgcgagaccactttgatggccgtagcctagctaatacctgttcctccctgtagtctgcttcctcatcctcgcggcggagctgtcgctcttctcactggtcgtggctcctatgccattcaagctcaagagcaagtgagtgctgcctgtgcttctcgcagtggttataggatcaggaagctgatcacgacgggatgttcaggttgatgtacttcttgtcggagaatcccatcgtcgctaagatcaactatggagtaagtattatattccgggtttacgcgaataggggtaattgacgccctccactcaaacccctgcagttgaaaatatccttcatgtaagactctgtactgccccacgttgccgatccgaaccccgctaaagagtcggttgtcttaacaacagattcgtggccgtcctgttcgtcgactctgtgcagaggatgatcaagatcgcccgggaggggaccgaggccagggaggaccgcgggatgcaggacatccgagccgagaccaactagtaagccatcgctttcgacattaggcctctttgagtaggtggggtccttggctgattcacatggtttcgtcgccataatgaatagccactcaaggaagttttacgctcagaggaactgtaggttgcgtgtatcggcttcttcgccggccgagctgttggctaattgacgatctcgcttgtagtgtacttgaccggattcactctggtcatggctttgctccttactagggctttcagcatctcgtttgacctcgtcaaggtgcacgaggacctcaacaaggtcggcaacaccgtgagtgctctttgtctttgtctttgagccagtgaaaccgttattgaccgacctggcttgtcaacgatacagaccgccaagaactcggcttccactcgtcagacccaggacttgcaggacgaagtcgccgcgctcaagaaaaaggtcgcggccagggacgtcgagatcgcgaacgtcaagaagcaggccggtcagaacgctaccgcttacgaagaactgtcgggacctgtaagtaggcgggggacgttcaaggtagttgtgggcagaagtgctgatcgtttgacaattcgccgtagaacgctgtgcgagctaccaagtagaagtcaggcgacaaggctcgatgatcaggggccaggacgatgagagggacgtcgaacagaataacaggtgaagagaagggcttggaaatagaatggatataatcacagcagtataatttccaatctacgaccgaagttgtgttgcgactcagccagacctagattcacgccgatgttagggatggagacggggctcctcgttgattcattacgtactcgcattgcctagatctctcccattcaagccgtccacggcgatcgtgcaaggtgtgaatccgcctttgaatagtcatggccgctgatttaccgtcgactacatctggctgcaagtgtttattgagatacggtttctcttctacatgactacatcggtatgtgattacttttcatgtacttattcggttcagagaagccccgggaattcggacgaagggatgcggtctggcttggatccgcccggatggaaactggtcgtcctccgacacgccatctagcacgaccctaatgactttccttggtcttcggtagctaatggaggaaatcgcctgacgagctcacatgcggtgaaatgacgctggatgccgattccttttcgagagcaggcccgatggacccatctataagaagcctcaggacagggtcgagagagacatgcccaccgtgattgcggcggaagcgttgtggaagagggtctagcccaggtcgcccgctgccaccaacgcctgctgccaccaattttcaggctaaatgattgaccggcaagataagacttggtatcgctggcaatcgaggcaagtcctcctggagcgcgaccctcagtggcgctgccgctggatcgcttcgcttcgcctcgacgtcgcgtcgaacgaattgattcctctcgccactgacgagagaaaacgcctgttcgcctgacagccaaatccgagggcggcctctagcgaagaaatacggcattccggtcccgccctcttctctctgactgggcagatcgcgacaagggtgaatcgcctgcgccttatcgataggcgtaaagtgacctcaacacctgaggattttccttcatccattccatcgacttcatgtatccgggcatatcatgtcttcccgcagcatactcttttgcgtagggtagtaccgcgtctctgggcaggatgtaccggtgccctctccacgacctgaaaaagggcaagtgcagcctcgtggtaaagtcgtgcgggtgcacaaagtcccacgcagggatctgatagcgttcgtagtactcgttcaggtgagcgttgaactctgaacccgaggcggcgaattcggcaaacgtgatatgccggacgaggccggtgaggttctggtcagtgcaccaggttcgtggggccgagctgagagttccgaaagtcttgcggagatgctccactatgtcgatcaaggcgagccttgtgggatcaaagactcgtcgtcaaaagtctggactggtttcacgagcggcacagatagactcacacgctgatcccgccccccatcgaatgtccagtgatgaggaatcgatccacctggattccctgcgcttccgcctcctccaacgtcttcgtgatttcaagcaaggcctgatctctcattcccaaccacatgtccaggaagaatgaatgtacctgtcttccctcccaataccgtgcgtagggcaagctccatctcttatgcgggtctttggcgtgtgaccaagcgttcatcttcatctcgtccggttttgtcgcctcgaacgtcaggatcacccgggttcccgtccggaagaggacggctttcctccctgccgaaagacccgtatcgaacgggaccgcggtgtcgagtatgaacccggtctcacgttccagtcgatcacacgtctcgggcatggggttgaactcggccagcccgttactgaattgagcggccagatggatgtccgcccaatctgcctgggagacttggaggagcttgtcactcggttgaatgtccatcttttcagctcggagtgggaggatcctatacccagcgatatgggctagccatgtgaggatttgagcgccggtagggttcttgacgtgcaagcctttaggttggggatggttgaggttgcccatactggctcgtgataagtggattgtagggcgatcatgttggtcgggaatttcctgtgcagcgtctcttctatcaccctagctgatatatgtacagcgtcttgtcaagaggtgaccgagaatttgaacaggtcaatagggggttttccttcatcttgctgtgcaatcgagctcggttccgtcggaggtcgggttcatccccgtcggcaaccgcgttcggcggagagcgaccgccgtgctgtcgagtggtcgtcatatcaagaatggacggtaatggccgatccgcatgtcatcttggaggcctactccgcctacaagctgcgaccagatctagtcgaagcagatacagtggggcagtagctgcagtagatgatatgactgacgagatacacatctttccctttgatgatgatgacgctcagttggttgtttacttttctctttgtgacaaaactggaatctgccctttctctactttcgagatgatgaatatatcatcatcatcaaaggagcaagaaggttcagctatcttcgcatcgcttcccatcaccaatgatgcaacggaacatactgggtgctaggtgacaggatatcaaccacacgtcatgtcaagatctgaaatggaactcttcgaaaagctctgcgacgacgtcggtttggacacgtctgtggaggtgacggacgaactaagagacaaacgagcacgtcaatacagtcctgcctgatcgtagctgcatagcactgacccgagcacatgtctgtacaattacaggcccgtattctaggtgacgggctcttcgatatattccctctcctcgtcaacgtagccgaacataccgcgatacccccatcccatacgccatcattcggcttgagcacctcgtctacttctgccacacacggaaaggttgtgcaactcgccgaactgttggcaacgcatacgagcccccgggaactcgtactcgtggtcggggaacagctggaaagagccaatggggatgtggatgattgtttcctgctcgacgaggccgaggatgagaatgaggacgaggatcaggacaatgaagatggcgcaggagagcgcaacgagtccaagctcggcaagggggatctggccgttgccggtctcagcctagatgaagattgtgaccggccccaacattcggaagagaaacctgggaggacgacgttggattgcctgatcaggcgggttcttttctgcctggacgtccttggtgccggtaagcctggaaccctatcaactttcatcaaaaccgccaccccgctgaccatatcgacttcatgccatcttttcctcgcgctcgtagctctcgcccgtacggatgcccggaaacccccttcggaccctcttcgctcgatcctcctcaccctaggggaattcatctatcagacatacactgccgtcaatgctgatgccgagtataccatcgctgggctgagcgggttgatagcggggacgagccggttctgccaatccgtctgggaatccggggtcgtcaagccccgaaagatggaatcgatggcccatggcgaggtatccgagcagggagagggagtgctcgagggggaggaagagatccaggcggtcgtcttgcggccgatgggccaggctgtcgtgcttctgcatcagaaacttggatggagggtcctagagcggtggtatctgctttacagcagtgaagggaacgaaacacgtccggtcagcggaacgaccgatctcgaaagcttcaaacgggacgatgcggaccggccgggagtcgaggagaatgtgacggcggcgatcaaggtgagtctctttcgcggcgctgaagttatggatctcgttatctgaccggcccgacttggtcattcgtttcccacagtcggccctcgcctcgttcggtcaccagaccaccgccgagctcgttcgcctgatcacccatagactgaccggattcctccctcatacagcgctcgtcctgctcaccgcgccctcccaaatgcgtgagacgatgcactacctcgataaggaaacgtccaaggaagaaaagagagtcctcttggaacagtcgactgccgtccttggctcggcaatgcaaggattggcttcggacgcaggatgcacgtggatatggctcatcgtcgatgtgattcgagcggatcgtcgttgggacggaaatgtgagagagatctggctggaagagacgacggccgagatggcgctcgaggtcagtcgccgtttatgccggatctggccgggatccgcatgatcgctgaacccttttcgggcttgcaatgaaccagtggatcgtacctatcatggttcagagtccgggtccgccgcgacgacacgccctagagaggctcttggctcgaattcctcggttggtcgagtctccagaagcttgggcaagattatgtgatcaggtgaggaccatcctcatcgaaacgactatccttagaaatagactaatataagctttcgatgttcaccagatcatcgcggaaaacaatccgttccacgaagcgagattgatcggactgaagcacgtgtgggaggatattggcaagatccagcgcagggtaagtgaaacgcacgacggctacgaatgccgtagcgggacaatgcactgatgagtcaattcatatgctcccaactattgcaggacggaaaaaaatacctggccagcttctggaagacgctggcgccgacgatcttccgccttccaaattgcgagcctgacatccaaacatcgagcattcacgaggtgctcgattcaattcacccacgatggatcgatcagggtcttatgttggcgctggatttcaaggatagggattcgggccggatccaggcggaagaaccagtagacatcatggcatggtttgaccaggtcgaggtgctagtcacgaagtgggagcaggaactcggcggtaaatcacgctcgaactgttcgcactacgacttgtgtctcatatcttctgatgttgcaggctccacagtggcagggcgagtggataagaatgagtctggagagcttttgcaaatgcgcaaagagcttgcgaatctcagaggcaccctcgatatcatcgaaaagtacctggacaggacatgatctccacaatacacgcacatacaagaaagatagctagattcgttgatagtcataccaaggacgcacgaggacgcccggagggaagttatacatttcgtcgaactagaagacgcgaggtccaacgccagcatcgagggtctctctctccctgagcgaggccgagcatatcgagaacatcgtcggatagcgcattcgcaatccggtcgggacctcgctgtatggaggaagcaatatagagaggctgcctcagaaacgtcgcaagatatagaagcccgtttccacaacagattttgaacgaactcataacggctggttcctcgtcttatcgttctgaaacgtgcgtcctgagttgcatggacctttgtcaccacaaacgttgtgaaacgagatcatgtgagatagtataatgaccgctcacgcccatgtgtcatccaattcgaacgatacctgaagactatcgatctcgatcactctcggaccgatcagacgttcagaagacttacaagccgtgacgagtactagtagtaataatgcactcggggtacaagttgccggtcgagaatctcggtcgaggggcgcggaagcaaatttctccgccgacatagcccgagtcgccgaatccgccggccatcacgcatgcaggacgttgatcaatcgatcaattgatgttgtccatttcacctaattgttcgagctcctcctgccatcatcgagcccgctctcagcgaacagggattggtcagtcacagcagcgcagcagatatctatagcctactcgtcaaaggtacaatcacagacatgtccgatcgcggcaagatgcgtcaaccgggaagcctaagtgtaatcaacgaatttagcgacttgatccccacccgcgactcggcaacaggctaaagtttgatcatcactcaatctcgctcttgcggttttcggagcgattcctcttaatcgcagttagcgagccggagaaaagattcagcaaaggacatggatcgaggggaggctggagagtgcgaatgtgatgacgacttgggtcgttgatcatccatcaacaccgacaaaacaacaaacaaaaacccgcccccctcccttttttgatgatgatcagctcttggatgaaacgggaaaaatcttaccgggcagggacagaggaagggggcccttgtatccggttctcggttcatgtccaggattcagggatagattacgattcgggacatgctgaccaggtgatagatgaaggagaagactacgtacggttgcctagttggcaagtcgatgataccgtcaaccaactgctgctgtgtccggaacaaatcgggttgctttgatcgtcaaaggtcagctgctttgattaccaagagaagcctttcgccaggagaagggtcgcacacaaaggtcctttcgcggcgaagaacgacttcaacacaacaacatcgacgtggacgataggaagattatcgatcgaccgattcgacgcttcgctcacgaccctgtcctcgaaatcttgatctcgataccacatcaccgggcgatatcttgcgcagtgctcattctttgtcgacgctcgaactcttgcacaacgtctgttgcagagctggagcccgatgaaagggtcaagcagatgtacataggcacttccctcgttgcctatagacgtgggcgaggatgagacgaacggggccgtatcaatggtgaacggttatccgtctaggtaagtagcttcacaggcgagatcaaccaaacccccgcttaaacgatcacaatcctcttgatccgcaacgacccgtacatgacgaccgaaatcggcaccagctcgttccaacccgttcgatatcctccttccacagaacgtggcgacacgtccgaccctacacccaacccgatcagacgtccgttccaagacttgtatcatcctcaaaacaacgaccttgcccggcaaccgactctgtcccacctgacctcgaaccccggcatcccacttcaagcacagtcgtgcgtgtctctcgcattgccctttcgagggcacgataacgaagccggatatctcggtggatcagccaagtctgaagggttcatgcgatccaaaccgcaaggcgctttgggaccaattgggaaagaaacgtcggccagcgaaacgacgacagggaccgcccagcggagaaaaactaaaggaaggttagggatcggtttacctctcagccggttgttcggatcgtccgtcgatcttctgggtgatctgaacggcctctctgatcgctacgacagagagtcggctgatgatatggacctgcatcgatcaatggagacgccggaaaaggggtctaaggggaaagcaagttggttacccttcaagagacaacgcccagctgtccaattctccaactctaccggaccacacacccgagcgggctcggggggtgggtctaggattgcggaaaccagccagtggactggaggatcaggtcgaccgacggggaagcggaacatgaccactggaaatttacctaccttacacaccctccatgatgctgagcaaagtgcagcaaacgtacacgaagcggaggagcccgtgatcatcatcggctctgcattgaggcggaaaggcagcatcaaaaacatgctggacaagtttgctgggaaacctcgacctggcggagatgcgagaggagggaaaggcaatgatcgcgaagcagatggggatggggtggagtgggatatgatgagtacgaaagaaatcccggtgaagaagtctcttgacaccgcgcacgggtctctgtcggtcgcgggatccggctcggggtctggttctgtgcgacccagtgcggacagcgcaaagcggtcccaggaagggtactcggctggagagattgttcctcggcatcaggctccgcctggagggttggtgcacggcctgcaagcaccaactcgaacggaaaggcaagcagggtgtctcgctgtgcctggcgcggagaacggcaagatcaagagacgcccgagttggagaaaggcgggtaggaacgatgtcaaggaggacgacgaagggatcggggcaccaatgctcgttcaggtgagtaccaggtcggttcgtgatcctctgccaacactaatcttcccgctatttgttgtcccgctacttgtagcacaatctgcatgtcacggcctcgttcaagggattgcctccggcttggattgagcagttgcgacaacaaggaatcgggcaaagggaaatggagatgattatgtcgggtcgaagacagaaggagagcatctctagtttggaaaacatggaaccagaggcggccgagatgcacaccgagccggcgccatcgcccttgcgcaccgtgaaactgccagagatcaccccgcatggatccccttctgccaacaagaagatacgtggtctgaccttacctggtgcgtacgggtcaactcctcttcacccggcacctcgaccggtgcgaccgacggtagaaaacgccatgaataacaaagcatctctggatacacttccgggtgcagcaattccgacgggtacactgatcgatcgggatctactccgatcgcccgtccaagcgcgaccgaccaagcatttccgaacatcgagcgagaacttgctcggaagcgtcctgaatggcattcagcaagggcataaaaaatcggtctcgtacttgcataatttgcagccgggaagtcatcgggatgacgagcctattcttgagaacgataccgctggatcgaagcgacccttgcggttcaggcgccgagccggcactgaggattcgcctttgctgctgaacctgtcaaaagacaccgcagttggcccggagctctactcggcctttacccctatccaaagtcaggcccggtcacgtttgagtaccgaagtcaagaattttggtacgataaagctgagctttgagaccgatcgctcggagggtcgcggtggcgatgactgggcgggagaggtcttgctatccctcgaccagggtcgcagcagcgcagacggacagaatgttctgcctaaaccctcgatggactcagccgtgcgggtaccgcggtctgtctcggtcgagactggcttctctgcctcttaccaaaacttatgcctcttggagataccagactcccgatttcgagaaagcacgccaagagggtacaaagcgagcgggacgacggattcggaaccgagcgagatgatccagtccccagaagaaattgcaagccgtcacatgatttcaattagcccgctgcgtagtctggacgacaacttcttaatggatcggacggctctcgacatcggcatgtcggtgcctcgttcgccaacacctcctggaaaagaaccgcggaccaaaaagatgtcggtcagtccacctcgacgcaaatcgagcttgaaccgaagcaggcttggtgagggaattttcggaagggatcccagcgatgagctctatatcaaaggacgacccagcgaagacggtccagcacctctgctgtaccggacaatctcgttgtccccttccccagacctggcctcgcttgcggacgacgacaccttcctgaccccaaccgcgagcgatgaacatgggcacccggtcgatacggcgcggtactcggaggccatgtcctgggacggcccgctgagcaccactgaggatcattcgttcagcctcgggaccgtccataccgcctggcgcgcggcgccgctgaacttcaacgttttcgggcagacggacgacgctaatccgcgcgatgtcaagagggaaagaagttgaatttggattcgcaacgactggtcgccagggacagggacaaggacgcttgaacaacgtgcatgtgtgtattatataggtgtgagggtagaagattcgtgcattacaccaaagaatggcgacgaaacgcggtacagagagacttgcgatcaatcgggtccggtccggataatcgatctctccgactaatttcggcgttgaccgtttcttcggccgaaggagggaataggggcaaaagggcgaggaaggaaggatcatattcatatgacttgattcgaattgcagaggcatgaggcatcagtaatcggtcggatttctatattcgtagtccacagcccacctcatccgacttagctcggcgtcaatgtgacctgacgttggaattttcttagaatctcaatttcgacttcgatctaccaccttcaatttttcgttatcgcttatccgcctgaccgctccttacaaagtcaagatgggcaacgtcgggaattacatctattcgggtgagtcgaatccgttacctacgcccaaattacaaagtctcatcatgatatcgtggatcccgtgcaccaggtttcatcccgctcgtcaagatgggcatgacgatcctcgccggtttcacgctcgccaagaaaggactgttcccccctgccgcatcgagaggagctagtcatttgtccatggtaagctataatgtctgggaattctgcctgagattccgtaccgacgctctgctcgtactcgtagacaatcggcttgccttgcctgattttcgcatcggtcgtgccagcgtttaacagcgataatatcaagttccttgggccgctgtgcctaagtgcaatcgtctatcaggcgtcgggatttgtgaggagcttggcttttggataagatgggagactcgagctgacgaagtagttgtcaacaggtcttgggtctgatcatccgggagctgttttacgtaccggttgatttccgttatggtatcatcattgtaagccataccctgcatactgccagatatgatcggaaagtcaatatcctccctctcaatcgcaggcttcgactttttcgaactggggaaacttgccaacggcggtggtgcaaacgatcgctactcaagatccattcgatccccatagagatccgacgttgggagtagcttacgtatcagtgttcatgttgatcgtgagtcgttgcgtagggttgtgtgcgtctttacgagagctgatcattgagtctgaatccggtccacagtactcgctctctttctttggactgggtacgtgcaagatctgcgcgtgggactttcgaccccgaccggaaggcgaggtcaatgtcagccggcgtgtcttgtgggccgagcgacggagagctctgggcaagatttgggccgggatgcgggagacgcatcatcaaccaagtcgcaggaggtcttcagtggagagcgaggccaaagccggtcaagagaccgacatggacgtggacatggagaagaatggtttcgacggcatctcgaacgctacgatggggatggacaagggatacgtggggactgggggcccaatcgagccggccctgtcccgatacaggtctcaccaagagatcatcgccgaggcttatcacgacgggatctcgctggcacccgtcggatccaacgtctcgcgagcgaccacgacgaacggtgttcgtggacgaggggacgatgccgggatgaggggacggggaggagtcggtacgaccgaggtgcatcatgaaaaggacgaagacgaggcatacccgaacgtagacgtgcctggacctcaaacgaaacgtcaattggacgcagtcgtacataccaacgccatcggacctgccgtctcgcaccatggagacgacgacgatgacgatgggatgacggtgaacgagaaaccccgtccgatctggcgacgagtgattggcggcatctttggcgcattgaaccctgtcagcatatccctctttatcgccctcccgatcgcgctggtcactccactcaaagcgctgttcgtcgtcgtggaggattggacggggacgagaatccccaacgggcccgatgggaaacccccactcagcttcatcctggatacggcagcgttcatcggagcggtgtgtattcccgtcggtctgatgttgttgggagcctcgtttgcgcgtctcaaggcacccagatcgtggtcgagcttgcccatcggtgccatcatggcgttgatggtctcgaaaagtaagtgatgctggtcgtacgtgggaccgcgccacaaatagaagctgatctcgtcgtttcgtgctctacttatttgcagtggtcatcgtaccgatcatcggagtaggcatgacgcaaggactatcacagcacaccaacctctacccaccagatcaaaagagtgagagatgtgtcgagtggattagaatccgacttcgatactgatccgacttgatgtcacagtcctgaaattcgtggccatgctactatctggtacccctgcagcggtgaaccaactcgtcatgtgagtccgagtgaaggaaatcgcaagaaatgcgctcccgagctcagacctacacccttgtgacgttcgtgtatagtacacaaatatactctcctgacggatcagcggatacgttgagcatgttcctcatcgtccagtacatcttcatgttcatcgcctcggccgcgctcgctgctgttgggctggcgtttgtcagttgaggcgccaggtaggatgagaagagattcctaggaggatgttgtacacaaggcaaagcacttggagctcgatttagacatgtagccggtcccgagtcgattagccagaatcttccttcgggagtgagatacgcgaaaacgatctgcccttgcccctttggacgctgctggtggagcgggagcgcgaggagatgttcgggagggttcgggtgcacatcaaagtcatgtttacagccagtagcgatcgggggtcgggacagcccagtctgggggggaaaggatactccgaagagttctaaaagggatctatccacccttcacgactacgagacttctagaggtggagccaagacaatttgcgacagctgggggcagggcaggaggagaagagacgaagctcgaggcgcgagagacaggactcggtcaatttcggcaggggaaggctgatcattcactacgtcattctcacgagagagggttttcaggagaaggcacgtgttagcgccgagtcacgccacctcacctcagccccgccccctcccgagcagccgccggggtgatttgcccgagttttgttagcgctcatcaaccctcgagacaggtcgtgacctcgtcgaagatggagatggttttcaatcccaaaagagagacagagacaagaggttcaagactttgccacgtccagctagaccaagaactacagtgacaaccaaatcgattagactcccttgataattagcaagtggaaacacgtttgacagcccatctccaaggcccaggaggacgatcaaaggtagccgaaactcgcccttgcccctcctccaccaccacctttgattctcgctgtgcaaacctcgctcggttcggtgagtcacactcgtcactcttcttctcttgacgtacgaccttcctctcctgtcaacccggcgacgaccaatatcatcatcgtcgccatcgccgtcgcctcctacctctggtctgtctactacaccgcccagatagcataactgatctagaacaacctcctccgcacgccatcttccccatcgcccgaatccaataatactaccactcccgctgcttcaacttgtatcgctcgaaaccttcaactccacaacccctgctccgaacaaaccacccatcagatcacgagtaagtcatcagtccacaacccggaacttgacatctcggacgccatcgccccccacctctcatcgacgagaggaccccccttgtgatcgtccgcaaggactagcagaccacaacaacctctcacccccgacaaacctcacagtacctttgtgtcagtccggtccggctctcaatcttcgacgctggacgatatcgcaacccaagggatggacggtcccgacgactcagagacgaccaatgataccctcggggtgaataggacggggtcgttccccccgaccgtcttcccccgtcgacatcacctttcgacggcgaggcgatctggctcgacatgcccggtcggagggaagagggtggaccatgcggatccgaatcataggtccggcaggatcagtcatgagagtacaacaggcaataaccagagcggatctaccgaggatgtggatgatcattcccaatcccaatcccactcacaatccaactcacggtctcagtctcagtctcactctcagtgtcaatcacaatggccggcattcttaccttcagagggagagacgatgacgacggggacgaccgagcagacggattttggatgcatccccagtgcgagtcctgggttgctcagggggacatctactggtcaacaaggcaagacgacgagggtcgccgggttgaggacgcccccggttagtacctatgcgggtctggatggggacgatcgggattgccgaaaggaagatgagaggatgggacgagggatgggtatcaggggtgcaagtccggtcatcgttgccggtggggaatgggaggagattgccagtccccgggtcggacaggatgataccgaactcgtcactctgggtcatgctcgacctcgacatggggaagcgacggcttgcgaagcgtcaccgtcgaccatgtcgacccccgctttgacgctgcagaatctcgaacgactcccagggaacgccaatgagaccaggaggaaacgattcggactggaacggactgcgagttgggcgagcgccagcgcagggagggtgcaagctagcttgaaccagcatcatgcgcatggacacgttcaggggacgaccacgacagagtgttccacctgcacgacgggggatagtgggttgcttttccgggaagaagcggtccgacccgggtttaaaaggtctcggacggctcactcgggagcgccttccttggcaaggtgtaatggtctcaatacgagacctgttggactgttgcagaggagcaggagtctctcggccaatacgcccggatccgctagtcgcactctggccaaccaggaggcgccgacgacgacgatgacgacatccgcgacattccatccgtaccggcttgcacccccgtcctcggtagggaagagactaagctccagggagatggactgggagagccccgcattcaacacgaccaaggatgccgggtactttgacccttcgtccgccccgaagcaccgtccgtccggtctctcgcggtcgaattcggacgcccgatccaatggttcttcatctaccacctcggggatgtaccacaaacgtacaggtctccttcgaccgaggttgtggagaggacatagtcagcccgttcgaagtcggcctctgttcgacacgacggggactatgcccggatcgtcttcctccatgaaggatgtcaacgcagtggacgaatacatggtcgatatggataggtggatcatgggtacaggggaagctgcgaccaagtatcctgaatcgagcgtacctgagaaagctacatcgatctcgacgcctcggaacgattcagtcgcgatcgatgatctcgacgaaagaacgatggatctggacggccaagacggcaggttgtgggtggacggatgtcgcgtcaagtgtggggatgggacggaatgtctcgccacttccgaggcgtacgtcctgacagtccagctcatgcaccagtgagtctttgacgtcgaataggtcgactgtccagctcgatacacacgctaacgactagtcttctcttgcctcagagcctactctaccagtctgtacgtgtccaaggagtacgacttgcacatctccggggaaaggacccactcggaagagtatcagcgggtagtcgaataccccaagacggcggatatgaccaagatgaaggcgaccttggtcgatggcctcgtctccgttcatggtaagttctggctcgaacagcgatctcgatgaagactcgtcctgacggatttcgtcccggcagtcccccgactggcttttgcacccaagctcgcggcttcgagctgtatccgacaaagaaccttgtgaaccagcagacacaaccatactgtatcatcagacacaacgcaggcctcgatctgtcgttcaaacgagactcgcatggacctcgacccttaatgtatcgttagatccgcattccccgagaccccttcccggcccccttgtatccatagtcataagaagcattaaccttctagtatcgccatgcatgtcgtcatctatcaaacaccctctaagttgaactttcctttgaccaagatgttgacatctttattggttccttgttcatggtgttcattgcccggagatgctcggtcgacgtcgaaagcgcgcgccaagtgggacaactagagcttaagggaggtggatggaggatgacgatcgacaccctgacgaccaactcatagggtctctcttaagtagcaagctacggccgaaaaacagatccgcacagttctcaaccagcctgtacttgaacgcataggaacatcaagatggccgcaccgctttatgtcactcagagtggtcgactttggcacgcaggtcttatcctgctcgtgaccggtgagtcgaggttgagcgcaattgaatacacggagattgctgatgccaattccctgtcatctattctcgcagtcggtctgcctggtaagctacgcacaagttcaatgacatgcccaaaccggtcctgattcctgcctacactgacagcccgaggcaagacccatgtatcgcgatcgctcgagcggtacctacgatggctcggagtcaagacccgttgttactcgcttggggactaccgacgcaaagtcctcggggccgcagaaaagatccccgccgactactttgaaccgggagagaaatcagaggagaccaaggcgttacggaaacggatcaaagacgggatcgagaatcaggtctgggatttcttttcctctcagggaggacaggtcgtcatctacgacgccaacaattgcgacaaggcgagcaggaaggacttgttggaaaagttcgaggcgagaggagtgcacgtcatcttcctgggtaagcggtggtgtcaacctgacgatcgggtcggtacgctcattctagtatgttgctcggtctgcatagaatccgtctgcgaccgaagagagatcatcgagaacaacatccgttcagtcaagctttcttcgcccgacgtaagcccatccatgacatggtccctgttttccactctgaccgtatatgacgatgacgaccgatcagtacaaagggtgggaccctgaagctgccgtggccgactatttcaagcggatccaggtccaggcgaacaagtacgaagaggtcacggatgacgagggtccgttcatcaagatcatcaacgtaggagagagaatcatcatccacagaattgaaggtgagccgggatatcggatgggagacggtggtctgggtgactcatgcgatatcgcttcagggtacttgcaaacgcgatgttgcttcttcttgatgaacattcacaaccagcctcgaaccatctactttgctagggtaagcatcgcaagacgtaatcgccgacggccgccaatgctgatcccctcgtaccggtcgacgtcttctttcagtccggccaatccctcatcgagcactcgtacaaggccgactcggatctctctccggccgggtgggaatacgccgaacgtctcaaggccgccgtcatgtctcgtcgcaagcaggtcatggaggaacaccgtgaagccggggaagagctacccgagaccaaattgagggtctggacttcggccaggaggagggctcatcataccgcttggccatttgtgcaatccggttacaaggtcgtccagaagcctcagatggcagaaatcaacccgtgcgttccgctcagaatgacgaatgatggggatgtcgctgatatcagcgccgtacgtcatccgctaggggagtgtgggatggtctttcgacggaagaagccaaggcgctgtaccccgacgaatgggagcggttcctttcggacccctacgctcatcgagcgcctcgtgccgagagttaccacgacttgagcggtatgtcgtttccgatagcctgcggccagaagaatttagctgacacgatcgtgctctgcagttcggcttgaacccatcatcttcgagttggagcgatgtcaagatgaccttttgatcatcggtcacgcttcggtcattcgttgtctggtgagtcgtcaaatgcgccgccgaatagcaagtttcaatagctgagcctataaccttctgtagctcgcctacctggtcggtcttcctcccaacgaagtccctgctgtcgagatcgcgcgaggcgacctggtcgaagtcgtccctgcgagctacggcgtcgtatcgcgagcgttccacttctggcaagtctgagaggcgaggacgaggtctgggcgcttttgttgatgtttttgaatttcgatatctcgcaggtcgggagagggccgtggagatgaatccggagccaatctctacgagaactttgccgaagcgaccgtcggcaagggtgtcgtcgatatgacgcacgtgctgcctaccgggacgaccgactatgaagaggccgctgcggcagaggagagaggcgaaaaggaaaaggaaaaggccaaggggatgcctagacggagtgagtctggggaagaatagaagaccgtattgggtgaggctcgtgcggtcgagtgccgggcgggaaatgacgagtcgtcttgctgatttccatgttctgtgatcagtgagcgagctcagaatttgagcatcatcgcaagcgatcgcatgttgtatatgtagtgtagaccattccatggccacgatgagatttcacgatgtgaccctaaacgagtcttgcacgaaagaacactgagaagataacgctcgaacgtcggtcgagaacccccacatgagcttttaacccagtccgtcctctgccctagttggtatcgtttcttcgtagaccggaccagacgctacaaagatgggccagttagaacttgaacgcgcaagcctcatgccacacaagccgccctctgtggttcagccttttgtctgttgggctgacttgcaagcacaagccctttttctttccagtccaaggggttggtaagcttcgctgggtgtgcttgatcttcagactgaaactgggcgacatcgcgagtgatgcggtcggacccgatgtgaaccttgatctagacgatccccgcgctggccgatcttcgcgtccgaccgaccggattaaaccgacagaccttgacattcgatccaacttggccaagatgcaaggccaagcccaaagactggcaggagtcgtcgtcaagatagtagaggctcctattcaacattgtaaagtgggagagagagggagagagattgtcaatagatcaagatgagcgaaacagcaaacatgtccgagctcccagaagatctcgagcgagctctatgttctctgacgacgtgtgaggtaagaatacgttcaggctatccatctgatgcttgccaggaaatgactaaaagtcgcaatgatctcacctcagatctcggatgcattgacagccctgaagttgtcgtctgatgtggtcctactggatggtctcaagagattggtcacgaacggacgaagcgataggctaggcccgggcctggacatcctggggagagctttcaccgtaaaggtgagcggctctcagacaggcatttcgacccctgccgcggttcgacgttcgttttgcgtcaagacgcacattaatctgatcgacgcctgctctgtcgcatagatggtacatgcttccgaaacggtcgacgaaccacccaaaggccaccatgtacgtcatgtccacccactctgctgtcgtcgacataatacctaagctaaatatcgcatgctgctatgtacagatcgataatgcacccaagggtagcgtcatctttatctccggtccaaccgacggtccaaacgccctatggggagacttgatgtctaccgccgctgctgcacaaggactgagaggagctgtagttgatggacgggtgagagacatcagggggctcagggaagtcggcgtgcccgtaagtttttcttatccatgatcgtgacggatcaatccgacagggctgacgttcgagaccgggacagatatttgcaaggggcacgacgacgtttggtcaaaagacgttcatccgaccggccgctcagcaagttcctgtcttgttccccttttccgctgcctccccctcgacgagcacgatgtttcctctgcgttccctgccagcgatgatacacccgggagacctcatcctgggagacgaagacggggtgttggtattccccaattcgtggtcggaagagacgctgcgggatatcgctcgggccggcaacgagggtaaacagacggatgagaaaatcacgaaggatctcgccgagggtagtggggtagccgagtcgatggccaggtggagaggaaagtagtccgaaggaaggtggtatcaaggatatcggaatcgccgtagtgtcgtaaaagttgtatcgttgcagtcctcgtttgagccgtatctttcagatcgaaaagggtatcctcgccatccgagccattccctttagtcttcccgccaagcgacttcgcccttggtccacttttcgcaccaataagcttgtttatggtagacctttcgctctgctcggaaagccttgacaaaggcgtccaccgtctaccgtggcaatggtgtcatcagcctcgcggttcggccggggacaaggattcgggctacaaaacgctcacctgatccgagtccgagctgttgacgaacgacgctgcgagtgcctccgtcttgttatcctggtcatttacagagtgccgcagtcgcatatggaggaaagacggtcggtaacgctatcattggggcacaagagtccgggtcagtacacggctctgggcatgctacttcagatgcgttcgcctacctgatacaaggctgcctgttgagcctctagctcgacccagcgatctttcatatgctgagctgtggcgtaggccgaagcagtggacgatcggagggccatcagatcgttctgcaaggagaggttcttctctgtaccgtgcatcatggcatcgcatcagccgacatccctaaaaccacctcgcccgtcgaactcgctagcgaggactcacttgccagctcctcattatcctgactcaacttttcttgctcgtccattgccgctgtgacggcgggtacggtaaagagaacggcattgcaaagtcggtcgtccgagagcacgtccttgatgtcgttctcgggcaactctgccagcttggggaaatcgttcaaaagagccgtgcttgtcgtggacatgatggggtctgcaggtgtgtcaccgtggtggatacgagggtatcggatggaaagcaagagggcaagatcatttcaaggtcgagctggtcatatccttccttcccttggggaaactcgcgattcgtctgatgacgcggccaaactcgaaacgccgaaacaccaatatccacgaccccgcccaggagcaatcaagatcgagtgctccctgcgtcgccaaacacaccaaaccgaaacgatcacgatctagacgtctcgtcacgacgtgcacgcctctcggataatggaaacttctatagatctcttgtagtataaacgtaaagacaaaaaggcacgaggcccgttcagacaatcacgacccgggtcccgcttttcaaagtcgacccttccggcagcgagtgcgacgtaggcgatgatcgcacaacgctctaagccgacttggcgtcgacaccggcgatgtaagagatcaagtcgcagacccttcgggagtatcccatctcgttgtcgtaccaagcgatgagcttgacgaacttgtcgttgagggcgataccggccttggcgtcaaagacggacgaagcggtggatccgacaaagtcggtcgagctgtcgaaaagggaaacgagcgggacgtgagcggcgagcaaaaaaggggtcatgtgtgacgccgcgttgtactcacacgacctcgtcctcggtgtactcgaggattcccttgaggggaccgttggcggcctcctggatggtagccttgatctcgtcgtacgaggcacccttctcgagcctgacgaccaagtcgacgaccgagacgtcgggggtggggactcggaaagccataccggtcaactttccgttgaggctggggatgaccttgccgacggccttggcggcaccggtcgacgaggggatgatgttggcaccagcacctcgtccaccacgccctgcgaacgagagagacaatgacggggcgaccttcgtcagaaacgcggaacgagaaagggatttttgttgacgactccaactcacagtccttgttggaaggtccgtcgacagtcttctgggtagcagtggtagcgtggacggtggtcatgagaccctcgacgattccaaacttgtcgttgatgaccttggtcaagggagcgagacagttggtggtgcacgaagcgttcgagatgacgtcgtactcggacttgtaagcctcgaggttgactccgcagacgaacatgggggcgtcggccgagggggcagagatgatgaccttcttggcacctcccttcaagtgggcagaggccttgtcgatggtggtgaagacaccggtggactcgacgacgtagtcggcaccggcggtaccccaggggatcgaggcggggtcacgctcggtgaagacgtggatcgacttgccgttgatgaccagcttgccgtccttgaaagagacgtcacccttgaatcgaccgtgggtagagtcgtacttgctgcgtgtcgggcgagcgcgagcgagcacgcacgagtcggagggggaaatggacgaaaaacatgggattttcgtgtttcagcttcccgatcactctacaatcccgtcaaatggtccacagcgcactcacaacatgtaaaccaagtagtccgagtcgatgaaggggtcgttgatggcgacgacatcgatatctccgtgctcgatagcgtttcggaggacgatacgtccaattcgaccgaatccgttgattccgacgttgaccattttgatttgtttttggttaacttttgtggggggtctaaggcgggtggaagaggggtttttgagagaagagagtagaggagacggggtgggagtggtgatcgatcatttggagtttgtcgcgatggatgggtttataaaggtatgtggacgcgaggcggatagcggcatgaccggggagttgggggttgtcaggcagacgacagaggatgcggggaggagaagaagagagtcagcgttcgtgtcctcggtctacggggcgaatgtcgaacaacgccgggtgatgatggggaagaggagaaagtcgtcgaccgattaagatcgatgacctcgctcgggtgaggcgtggcgacgagacacacacactggggaagggcaggaggagatgacgaatgatttcgaggagagactcgggacttacggggtagagttgaagtctgtgtggtttgaaccgaattaaaccgataatgatgcggaacggaagtgcaaagtgggtgagtttggtttgtttttctctgaacgaggagaggagaggagagtatatagggaatgttcggggacgcgcccagagtcagcgagacagcgagacagcgtggtggtggtggtagtggtggtagacgacgttgggggcgaacgatgacggaagcaaggaagagagaggcagagagcagagagcgagagagagaggaagtgtgtgtgcaccgacccaggcagagagcgaatccgttgggggggccaagtcagtgaacgattggtggaaagcgtgggaaactacacatttcgaaacggatctgattccgttttgactcgaacggatggaaattgttggataagcaagtcgtcacgctcggctcgcggctcggcacgttctgattcgctacacgcgtactccctctttttttccttgtcacgcttcgaacgttcgagttgattcatcatctacgctcaatcgccatcgtaataccctaggatcgcacagacacacacacgtgaattcccaatccctcctgttatccgctcccgcggaacgatctcgactcgtcaaagaggcaccccaaccgaagatctcccgaacgacgggaatctcgtcatgcactctgtgcgtttaaacgaatacatcgcggtaaccaataaacgaagaaacgcgcccttcggtcgaggttgtatgaaactctgacgccggatgtgctgagtgaaacgaaattagcggagtgtgaagactcgaccgtcgttccgtaggtcttgctggtcgtggcgtcatgacgaatagatattcattggcgaaaatcacagctggagagactcacaaagagtaccggtcaatcgtttaaattgacaccctcagcggcccgtcacgagattgccttttcgaaccgcacccgaccgagcgtcttcctcgtcctcgttgttgaccgccagcgacgtcggtcctgagagcttgccttgcaaggagcgcagcctgatctgcctcgattggccttcatcgtcacgacaatgtgacgaccctttctgcctgaaaagagtatgagctcagttcgggctcggctcgcaaaccataccgaaccatactcccacagaagagactctgtgatggacgaatccagatacattgccggtatcgcaggcgctgccgttgtcggtcccctctcgtctcccgagtcggaacgatgaatcgaaactttctcgactttggatgttgcatactttagtagcatgcccgtatatatgacaattatgcgggcggattagctagaaaagtgctctgatcaagctccgatctattggatcttagaacttgattatatgctcgagacgatggcgatcgttccatgtatcacgtgcagtgcgttgaggtcctacaagccagccgaggtaaattcttacctggcaagccataatcgaaaatagcgtgatccgagacacgggaatttttctctattcgtttcggtgacatccaagtgatccaagtgaagtaagtcttcctggttgcatgataattgctgatcgcgtttgagggtgctccgctcacgtcggtgatccatctgacacgcgaactttgagtgacatggccgtgcgctcgtcaccgtttccggcggcaacgaccggtcctttgggttcgatcgataacaatacgctcaaaggactcgtcaacgtcgatcaaggacttcatgatagtcaaaggaacctgtgcgaattgcggatgatcaagggttcaaaggggacgccgtcgaaaaagtatatagcgggtcgatctgtaatgcgtgaaacatccaagcatgaacgccggctaaccccccgtaaaagttgaaccttgtttgccgttcgagctataccgccatgtcaggctttctgaacctttccagcaggtacaacccgctcgttcagatccttattctgagcatcatcgctgctctgcgcgtgtacacactttcactaggtcaacgacagagctgaccggttcatttttgcctctgcgcgcgatttcgtagcgctgaaggagcgttcatcgccgcgtccagtatcgtaggttcgccggaggatgttccgtcacacctgacctgacgcaatggtcttaggggtcaggcggcacttcttccttgaaagactacaacatctcgagagcactcttgaatggcgctcaagctctttttggacccttttcgggaggtatcgtcaattgtgagtttgtgtgggaataactcgccggcgataaaccggtccgaagcgtttcaccctgaatttgtagggatcggcatcagattcggcctctttatcggcggttgtttcatggtattgcgtaagtaaatcttgactatctggctcgcagcaccagacaggacgagagctgtcgcgcgatctgaagctgagcatacttttaactccgcatcacagtggtcggttcattatggcaatacaatgtctcgcatgacacgactttcatgtggacgatatctttcgcaacgggtgtattcggttgcttattctggacatcctgggtatgtgtctaacacttcccctcccttgagcgctctcgtgcgcttacatactacactctcaggggagcctgatggtatcgctaccatcggagaaggataaaggcactgccacatcagtagcatggggtatggtgagtaccatatcatgctttcggtctcttccgatgatgatcaatcatatatgggactgccttcagattcaactcggcgtcattggggtgtccgccatcttgattgggatctccaataccagaggcgatgctgtcggatttccgaattgcaagtccaacaccgtgatttgttcaccctatctacatctcgccagtgactgagaccgttacgtttttacagccattcagctagctctcatcatcgtggtttcgtgtagcctggcgttgatcttgctgatcgtaccgttcgacaaggtggtccgatctgacgggacgaaaggtaggtggaccggttcggcgttggacctgactgttgttgagatcctttttatcgccactgtagtcatcatcccgaagaagcccacccttaaagaggaaattcggggattacttcgagtgatgcgcgactggagaatgacttgcttgactcctgccaatttcctcagtgggtccccgtagatatgactgtgctatcgctgcgactgagcatttcgtccattgtcgcacaggtctccaaaccatggtttaccatgtaaatacacagccgcgggaacgtaacagtcgctgggctgaatcttgctgacatgcccgtgatagagtgccatcaacacctttcagtttactggtcggaccggcgctcttgccagtctgttggcaggagcaggctcgggaataggcggcggaatcacgggtcaactgctcgaccgaaagaacctatccagacgtaaacgcggagtcgccggattgatctttgtggcggtagccttgtggaccacttggatcggagctgtcgtgaatcagacgaaggtccgcttgcaaatctgctggggaccaattcgactgacattgacaccgctctgccttagttcaagcggcaacatcctggacttgggatcgactggtccgatcgcggagtggctccacaactagttctccgctttgccataggcttgggcgatggttctttgcgtaccctaacctgtgagattgtgacgaccgagttgaaccattttctgatgttgatagatacacgcttgacgctaagtgtggatgattggaagtctatccaacgacccttcagtaggcgctaggtattcctcggtctggttgatgaccctgggcggaggagctactttcgtgcacatcctcgacgcttcggaggtcagtccttgattcgatgcatctaacgtgtattggaaatgccatgctcgccagctgatgcatcgcaagactgcggcagatctcgttgttgatcgaagcagctgtattgctaggccagagcgttttttgcataccgctgcttgcagtcgttatctgggccatacctgacatcacggtcgaaagattcgacgagcacgagggtgtggatggctctctggagacgattaacagcagtgacaaggagccgacgttgatgaaaaaggacgaaacgattatcgttaatgagaatgcagttgcaccgatcgtgaaggtgcaatgagctgatgcttccattcgtggtggagctaggattgtgggaatcatctatattcatgtatcgtatcggtcgatgggacgttggatcatatgtcacacctctctcttggtatccctatacattgtctctgttattgtatgtcctgaaatttagagccttccatcaagctcggcgtcgacctcggcctgcttcttgaccctgatgaccttgtcgacctcgacggcgttctgagcgttaccgagttcgaactcagtgcaccagaatccgacgggaattgcaacaatggtgaagaccagagcgagtagcaatggaagccaagacgcctcgtcgtaagctgttccacggcaggtctcatgatcagcctggtgtacatagttgcgtgatgatcgaaacttttgacatacctcgaatgatggctgcacgaggttctgctacgtgagcgatgggggtgcttccggcgatctcggcaagctgagtcgaattcaaaacgtcaccggcgtacatggcgagtcgcttgggaagttcgtgggtccacaatgcaccggcaatggcgttaccaatcgcgcctccgacactggtccaaagggcgagcaaggcgattgcggtacccatgtctcgatgtggaacggcagcttgtacggcaacctgtgttccaacaacggaacatccaccctgtttgtgttgggtcgtcccgtcagtcgtgatcaggagcaatgtctagatatccagcgactcacacccaatccaacgaaaatctgactcaagaccaaaacggcatctcccttgttgccgttggcagccatgaactgcaaacccataccgctgatattgcacaggtgatcagttcgatatctagaccagatttctgacgttgtgactcacatagctcgggcgcagagaccgaacatcaaagtccacttgtacctcttggtgtatcgcataacgacaccggcacagagaccaaagaagcacagagcgactcccaagctggtatacgaaaaggtactgatgagccccaagcgcttcggcaagcttcatctcgatcgacctacgattgactccagtagttgtagttgacaaactcccaatctttgacgacaaagatccaagaagagaagtagttgggaaggtaaccggaaaagtagtagaggaagtcgatgatgcagcagcagaccatggttcggttcatgacgcgcttaggcatcaaggggaacttggcatatcgccactcccaggtgaagaaggcgatcatagtgatccctccgacgacaaacatggcgataagagatcctgacaatgcagtgacgttagacgagccccgaaagctgtcgccttacttgccactcacggttcttgtacccatgatcggcgcctgcagcgagactgaatggcaggaggatcaaagagaaggcgaagccgaggaggatcaagccgaaaccatcaatccttcgccaataaaagaccatccacgaccagacggtctcggtagcgttcttgccctggatttgttgcttgaaacggaggtccgaggaagcgaccgagatggctagcgaacacgttgatcgttaactacggtgcttgtgattcgttgcaagatcaccaagatatcactcactgcctgccttctcagctttgtgatcggcccaataaaggacgaacaagatcggggccgcacaggcgggaatgatgatggcgaacattccgtactgcgaaattgtaagattcagctcgtacgctctctattacggaaagaggaagcgcgacttacaccccatcgccagttatcgtttccgctatcgacgtgcaaagcagacacgatcctaggagagatggcaaagttgatgacgtagggcatggaagagagaccttgcatgaatccacgccatttcaagggagacaagtcacccagcaggatggtgaagactgcggagcgaaaacacaatcagcgaacgcaagaatcttttggccggactagactcaccaacatcgacaccagttcctcccatggtggcgagtactgagccggcagcgaccgcggtgacggtcttggagacggcagtgaccatcataccgagagcgagtaagatgaccgaaccggccagagcggaaggtcggctgaaaagatcggcaacctgttcgagtgtcacaatcgaaatgaatgagttgcacgtgggtgctttggaaatggagaccatggactcaccttggaaacgaaaggcttgatgactccgcccatgatactcgtcagaattccgatggttgacaacaaggggtgagcgccgaaggaggagacggcgaattgctggtagttgtaagctgtgagtgatgagcgcgcgttagttctctatgtgacatcgcttaggagcaaggtgggaaagacgtactggtgttgccctcgagcgagttggcgtagcagaacagaccaagggcactgtgggcacgcataaatgtcgtcagtaaccaaggcgattccaggacctcgagtcggtcgtgcccctacatgtaaagagcccagagcttccatcctagaccgaagacggtatctggaagcgagaagcagcaccgcgtcagctgagagactctgagattgcgtgctgttgtcaggaggtacactcacacaaagcctcgatacgggacacaccagattcctgttccaactcgaactcggaggaagcagcatcgctctcgttcttggtctgctgatgcagttcatagctggccaaaggctcagcgtttccaccctcagcatcttctccctggagctgatacttcttggcttcatcactcgtccgcctgctctggtcgttgtcgtactcgtaggagttcatggtgtctagcggctcaacttctcctagccagtcttagcgcgatcttgatacggatcttggattatgggatacggcggtgagcaacctgatctgcggtgatccgacgtgacctggttatataggtcgtcagctcactccgatcaagggcggggttgccggatgaactttcttccttctccgtacattccctacacgacccagagccactaccagcgcccgatcgctatggatcggactctcgtatggtttgagttttttcatctcccctttaaacaaggtggtgcggtgtaatctgataagccggcttcctcgcttaaccatgtggatgaacatgggcgggccgtcaactccgtcttggcaagcccggcccgcctcccccccgcccctgcccctaacccctaaccccgcgtctacaacgagacctagtcttctggctctctccagagggcttcgtacatctgcatactgcttgcgatcaagaacgcacacgatcctgaaccgccgtcagtgtcgagcacgtcgtcagctttgctcgtttttgcaattcgggaaccagacggacgcaccccaaaacgtcgatatcgcactgttcaacacccatcgctcatcctgactgtagcccattgccccgcacagtgtaaatcctacgcctccggccaagttccagaaaccgactggacaatccgtaatcgtgatcagtgaccgcgttcactggagccgaaacgagcctgctcactgtgccacccgagatctttgaccttcggcaaccaccacttggtttgcacctcgatcataagtagcagctccgagacaacgaacccagtgccaccgaccactacgcgtgcgcgccgagatgtcagtcaacgcgtcccaactgtacggctcgaatggctcaccctgaggcgtccagaagaacactttgacgatggctgcgttgccggaagctggaaatccaggaatcacgccgggcaagcccgttctgtcggatcaacgatgggtttagtcacgagtcgcaagcgtctggacatggtcgtcgaccgacatcgttgagaccaagaacacggtcgctgcagccaattggatgacagcagcgtcgtaacccaagtctctccacaatggtcccgccctgtcgaagcaccagcccaggacgcatcgatcagcgtggtccagtcggcacctcatgaaacctcgcgaccacgtaccaccagacaaacttccgtcgtcccggatccaaacctatcaacgccgtatgacctttttcgccatcgctctgaagacatccctgggggttactgtgactcgggtgccgagttgcatgaccagactgtaagagatgaacgaccgccgcaccgaatccggtctctcgacccctgaacagcgaacgactcgatcgtcagctccgacaatcgcgacgccgagtagtggagatgactcgcctgttcaacgcctccactaccatcaaccaactcccgacctcaaagacgactccgcccacgaacgccaagccggaagcggtcttgaaatacgtcgagttgagcgataccgagtccttgatgttgtccaggtagaggggaagaaggacggtaaaccctggtggcagacgagtcgactcgattcagaacatgccgaatgagaactgtttctccgagtgatctcaccgttgaccacccacacactactcccgaggaggaatgtcaccgccagccagaacgttatgtcgagtttgaggtgcggcttgagttccgatcgtgccttgtccgctcgcaacctcaacgtcacgtcggcgggctccgttgacgccttctctggtgcatcaggacggtgctgaatctgtcgagtcctgagagcgtaacgaccctttctggcccttctcgagtcatattccaggctttccgtgtgggtcgcgagcgtcggctctttgtcctgatcgggaacgggacgatactgagcgctccccgcggtcggatagaagaaacccttgtgtagcggatgactgtagctcgtagcatgaagtcggagtggaacgtccgtcatcctgaaccactgtgtacgttgaatatgttgttgatttcgcgagcgagggcgtcaaagtcttgtctacgtcccattcaattgacggctgctatatataaaccgctccatcgactcgaatctgccgggaatgttgtcgagcgggaatcgtcgtcattcatcagtttctacgagacttgaagtcaacagaacaaccaagacaagtcgttcttgccattcgaatttggaatctttggcaaaagccgaatgatacataatagataacatgaggctacaaggtaccacctggagcaatagcccggtgcggccatctctacacatctcgtcgccgtctccgcggtcacgtgatttaacttgatctgattgggtttgactaaaagctgaagccgtttcagattcgttccatcaacagccagacccatcacttgtagtcccgaaagacattcttctcttccggcgaggcggggcaaaagtgaccatcttcggggatgatgtcgcgctcaaagtagtcggtcaagaccctcgaccaacaagtctgcggccatgcgaggtaagaatgacctagcaggggccaaggcgccgacgaaaagagcacgttgatcagcgactattgacagggatgagtgactgatggatccgccgaacgtaccgtatgattccgcaacgacatggcgggacatgttgccgtaaagactggacatctttttgcccgacagcgatggcgtgatagggtcgtctgtgtcggggcgtgaaagcgcaagtcagctggtggacgagcgttccctattcgtccattcgtgctgagcgaagcactcacagacgttcgacaagatcaggactgggttggccaacgttgtctaatgagcaagaacgggtcgcgctggtcagccaaaaggtatcctgacaacgatcgcatgccgaccggaaataagacttgcattccaagggccctattcaacaggatctcgacctttagtccgatccgtctatcaacacttgcaacctcatgccgactcacctcgaatctctcgacgggtttctcgctctttggccagaattggcaacctccatgttgttccatcatcgccacacttttcaagtcgttcatcgacgattagtccttcgatggagcatatttccgacgcgatgacccgcactcacgtagcgccaaacatcggcgagacatctctcctcactctctccagactcgcggccatcccctgtgccgaaggcaatttctcccccttttgataggtcggtgcgtctgcacaactgaccgccaatcgactcaagtcactctgacccgtctgccctggtctgcttcgattcaggtccgagatcggcgcgaggagaaagtcgcgaagggcggtcgagttcgagtggtgaatagcgtccgacaaggccgaggcgatcggtttccattcggatgggaattgtagcgcctggaaaagggattctgatgacgagcgatgtaatcagatcagaacccagcgcgtccgcatgaatggtcgctgcgactcggtcataattggtgactcacgtcgaacgtatccgctcgtgaccaatccgggtcgctttgcatcccaggcggcgagaggctcccggtggatgcgctccaggaattcttccatcctcgcctcgatgtcgcgccagctctgatcgtcctgtcgaacaagcttgcagtcgtcccggccggcttggaagcacgacttgtaaaaagcgcggagggtcttttcggcgtcggtcaagaggacccccatcaggttgtacgcttcgtaatgttcagtcgcccacctggccgatcgatagtgatcggagagtagggcgacgggacgacgacgagttcagcctcctcgcttcgtgacgcctaaggatcggcggccgcctactcacatgacgggatccgcgactccatgagctacgactttgccgatcttgtttggcaacatgcccaacaagtatgcggcccaaattgtcccgtagctccctcctaccccgttgatcttggcctcgggaccttccagcacctcgttgatccgctcggtatccctgattaaggtcgtcgtcccgaaatgcttcaatacctcggcattcgacgacgccgaaccagcacatcgcgatgcctggagcttgttctgcgccaggaagcgctctaattggaacgtcaagagggggtccgtcgaggtcaaattcgcgttgacgtgcttatcgatgcggggcacgacctccaagccgagttcttcctcccggttcgccttgactactgccgcttccaactcgctcccccaacaattgaccaccggcctcgtcctaccgatccctcgggggtcccaagagataacatcgtacttgcctccgatcgaccgatgaatgttttttccaaaagagaacgacgagtggtagccagaaacgcctggaccgccgtagttgatgaggacagagcccagggaacgtctcttgtgagaggaagagtcgatgtcaagggaagacggaatcttggtcatggcgaggtgggtcatgccgaccgtcgcatcgtggtaatccgtcgggaccctgttcgacacgagagcccggtacgatgcgcgagcgagccacgacgaacaagggtaggggagggttagcaaagcgacatcctgtactggaggggaccagccgaaagggcgttcgagctatcactcacgtaaagacggtgcaccacatcgtctcgtcttcctcgcaccgggtccacttgaggttctttgcggtcgtgatctctggctccgcttccatatgatccgcttcagagccagtgtcgacgtctctccggaatgtcccgagcacagtgagaccgacaaagacagtccccaagaccgtagccgtggccaagaccaaagtcatgcccggaccccatgaatagcgtcgtcgtcgggaaggtcggccgagcaggccagaagtctcgctcttcatgttttgttcgtcgagactcacggtcgagatatggagacttgcctcttacgtgtgctagcggtgcttaactgcaagtataccatcgatgactttggtatgagaagcgaagtagtcatgtactcgagtcccaagtgagatcgaacacgacgagctggcgactcctcgtgcatatgggtcagatctggagagaatttctatttcgggcagttttctcagcccggcatgtctcggagagttgtcggcctcggccgagaccgagacgatcgggcgtgttgccaaaaggattcaaatactcaacgacgtcgactacgatttcgattagcactcgctcgtcaacgaatgtcgatacaagatcggcgcaacacccgaatacttcggtgtccatgctgtgataatgagaaagtctgagcatcgactcgctgcaattgttgcctctcccccacgtgcgcattggtgacagcacgacatcatgaaaacagcagcatgaccacgccagacttggttgtagcgatatttgtcctccgccgcagatccttctattgccacgggctttcagctcaaatggccacggcacaagtccataggcgatagatgtggcgggtctcgaaatgtctgctcccgcctcgagacgtacaatgctagcgagctggaaagatcggcgaacggaaatgcattggtcaaccgttcgccaagagcacacgacgtaaggaaatcaactatcaacatctgccgcgccggctaaaccaactcttttgacgatgggcgcatgctgatcttgcccgtcccgaagacgttgccccggtcagcgaccgacgggtgcattcacgtgcgagtaatattcccggacttttcggcctgtggattccgccaagcggggctcccgtgtttccgacaggatctagaaaatgttataaaacagcaacagagtgagtcacctccgattcttccaggggaccagaatgaatcttctcactgctactcagaaaccgaaatgattcacacgcacaaagtcttgattggaattttgctcgcgctttccggtgtcaccccacacccgaccacccagagggatgcgatcgccatccgcaacgatgagacgtactctatcgactgggcggccgcgacgcagaaagctcaatcagctgtcgctcagatgtcaatcgaggaaaaggttggtgagaaagtggacgagcgttgaaccgcgcttggttgaccgatcctaccggccacaggtcaacatgacgagggggaccgaaaacccgctgtgtagcggaaacctcaaaggtaggtgacccgctccgtatacatggcggatgctccgctgataatacatttctcgacaggaatcactcgattgaacatcccggacatctgcttcttggacggcgcctcgggtttgcatatcggatatttgcaaacccagtatcccagcgagaacggagtcgcggcgacttggaaccggcagctgactactcggagagccgtggcgatgggagaagagtttcgcaaagccggagtgagcttctttcagacaaattcccggatatctgattcgagaccgaacactaatgtcgatacatttcaggtacacaatgcgttgggaccagtgtgagttcgagcaatttccacgtccagtcgatcgcgcctgaccgtccgtcgtgtatgatcgtagcgctggaccgctgggatatgtgagtgcagatccaggctggcgatgcaatccatatcggaccatgtctaaactgacgtacgccttctcagacgccctatggagggagaaactgggaaaactttagcccagacccatacttgaccggccagatggcttccgctggcgtccgtggcatacagtcagttggcgtaggagccgtagccaaacactttgttggtcagtaccgagatttgcgcaatgtcgagaaaaagggctgaacactcttttacacaggcaatgagcaggcaagttaaacgtgattgtgcagcagctccatatattgacaaaatttcgcccccctccgccgcaggaataccttcgatccggtactcccggacaaccgaacgtggcaggacctcaaagccagatcatcaacgacgacattcccgatgacgtcttgcacgaggcgagtatcggcgccgagagctctgtcaacaccagctgacacctttcgcaaacgttcagaccctgatcttgccctttgccgagatgattcgcgcgggtctggggggagtcatgtgttcgtacaaccggattaacgagactctggcctgtgattcgcccacgctcagaggtatcctcagagatgtgagtgaatggtctgagccagttcacaacccgagctgattcgtcgaacaccggctttcaggaactggccttccaaggattccagatcagcgattggggtgagcatggattgcgagttgtcgagtgaacaagagtcctgacgacatgcgatcccaggcgccgctcgaaacgcctttccctcgacgaatagcggaggcaccgacatcaatatgcctggaggcggtatccccgtccccgggctcgatccctggggcgatggagtgctggtccaagccgtcaagaacgggaccgtcactgaacaacgtttggatgaacaagtgacgcgcgcattgattccctactatgcgcttggccaagacaaccaaacctttccctcgagcaatctcagccgagttgtattcgctgacgactcccaggtcgcctatgatattgccaaagaaagcatcaccatggtgaagaacgcggagggtagtcgcggtttgcccttacgaagccctcggagtctgggtcgtgagttccagagcgaattggcacggtcacggtacgaactgaccctcgccttgcgtgtgtagtctttggagacgccgcgctcgacccggtcggactgttgcactttgtgggtcaagagggaccgatcaacgagatgcccaccgggtatcgaacatccggtgggggggccagcctcgctctgccaccttggatctacacaccgttggaggccttcacagacagggctcgaaaagataaattctacctagatcacttcacttccacgtgagtcggccacggttgtcacagtccatcgacagagccggggactaatgtcgcggacctgtagcaacgtgacatttggcgctcaggttggatcgtttggagccgggaccgcctttcccatcgacggagtattgtctcgagtcgagtcggcgatggtttttgtgactgcatactctagcgaaggctacgatagggagacgctcaaggcgagtcgaggtgaggctatttgaagcgtaaaccagctgacgccatcgcttgtaggtcgacaacggtggtgacgagctcatccgctacatcgcggccaagtgcgacaacacgatcgtggtggtcaacagcgccggcccggtcgatgtaagctcaggaagtactgtccgatttgtatccagcgatctgaatcagtcattctgcaggtctctggctggattggcaatgacaacgtcacgtcggtactgttccactatttccccggtcaagacggaggtcgagcgttggtacccatcgtattcggcgacgaaagccccagtgggaagcttcgtgagtttccccaccgagatgttgttgaagccagactgactcgcctcactccgtgtttctcagcgttcaccgtcgccaagcgccccgaggactacgactcgagcgtctactttacgggtaacgctacgctcgaagcgccgaccgtaaacatgaccaacctcatcgactaccgattcttcgactatttcaacgtgactcccgagttcgaattcggattcgggatgaccttttcgacctttgatctcggtcaactcgaggtcaaggcttgtggaagcggggcggagcacccaatcgccaggaccaatgagctgttgctggattccgatgccaacctgtacgaccaggcatacaaggcggatgtcgacatcaccaacacgggcaagactaccgcttgtcaggtcatccaactctacgtctctggaccgggatatggagagaaccttcgtcccgtcaaggtgttgcgcggtttcgaaaagatttgcctcgaggccgggcagaccaagcgcgccgagatgtacctcgtcaacaaggatctcgccacgtggaattctgccagacaaggttgggaggtgaagacaggggaacatgttgttcaggtcgggttcagcagcaggcagctgatttcgaaggcttcgatcgaaaggcagtagggcgggagcatcggttgtgaatgcgtcgcgggggccgagctgcgactacttcgtaacaggtcgacctttcctcaaggcggcttccatgatgtatcgctactttccgccaattcaggacttttatcgatagacactcccctggtcatcatcgagactgtgttgcagggctctccgtacatgtccggatgttcgggtcccatcccgtcgcaagccctgacggcgtctttcatgatctgctggaagagtcgttgattgtttggatctcgaatctcccgccaaagcgacatgtgggggccctgatagagggacgagatgctggagactaggtcggaatcgctggggagcattaccccgggatggcgggatgaatcgatgtctaagacaaaaagttcaggtcagtcaggctgagatagggacggcggcctgtgcatgcgcaccttctggaactcgaccatctccttggcaccaatagtagggacggaagcagcactcgacccaaccgatcagataaaagtgcttgttcacaccattatcgttggtcgcattcgctctagctctgatttgtcgctctacagatattaaagaacggtcaagtccgatcatctttcgcggacatcggatcggtgaaacatgggtggacgggtgatatgctggaaaaaagtcacacgtccgttcgtacaatcgaatccatctttgatatagttcggcaatcgagacatatatgatcgtctggccatgctggccattctgttctatacatcgacacgagtaccgtctggatacacagggtctgggttgactgtaagcacgctacgattcccttgtcgcctagaaccgaacggacattccagatcagtcgagcgcatcgtgccgactatccgttgaccacttacacttgatcgggcacactgggatgaccaacattgagtccctctaccatcaagactgccataccggcttgcaagtggtagctgttgatagaagatcagctcgtgggtctggttcgctactgccacggtgactcgcctaatatggcaatggaaaaaggtcaatgaggggtaagtgacctggtaccgaatcaccgcccacgtcggaccagtgaaagatggcaaagtgcggtaggtgtctgaggaaaatgtatgagcatgagtgcgctttagtgagaagatgaaagactcgcctcggtaaaccggattgtacaggttgaaactgtccggtacggcttgttgcgccgttgccacgtcgggccagctaaatggcccttgaccctggccaatactgcacgacagggatcttcagcttggcgcagcaactccagctcacgctcgactgacacccatgacttggtctcgtgcttgtggaacggctgcaacgttatcggccttcagcatcgaattgtcttcgcggatgctctgcacagactcacatgcgtcggctgcccaggcggcacgttgaatacgatgtcaaccacgctcccgttgtttacccacaacgctacacccgcgtccaacgatggctgcacatcgatgatggccggcgtctggtcgtcccgccaagcgaggaacggctgatcgtccatcttccaaacgcgatcgttgggttgtgacatatcccagataagcgtatggtccgcgctgggaggcggaggtagggggacaaaaggtgccaggcggaagggatccaaaatcgtcgcctcgttcaaggcgtttcctgcgaatccgagcttaggttggtttgaagggggcgatgtgaaaacggcctgaccgcagagtccgggaagaccgccagctggactatcgcacggctcgacctggtccacataggacaagacggcgtaccctccaatgaactggttggtctgcgagttggcagtgcgaatcgtccagtcgccagggttgtcgaccttgaccatcaccgaatctgtaaggtacacctttgttattggctacttctagctcgacgacaccgaagtaccagctcacatcgtgcgccgacaccaataagcaagatgtccacttcttgcggttcgatgtagttgccgtccgccgcatagacgatcatagaatggccatcgatcgagacctgcgatggaatccggtcggtgagcatggctatcagcctgactcgatatcacgtcgtcccacctgctgctctgccaatccaccggtcgagataaagttcaacgacgcccatccggccttggtatcgacttgtaaaacggtgagaggctggaccgtccgagcgactgatctttagcaccataatcgaccatgcatacgctcgaaccgactcacgttcgaggtattactgcaaccctgatacaatcgctccggcacctgatccgggtattgagcggtatagttcttggctggactcatagacagtgtgctgttaggtagcggacaagccttgtcggtcaagggcccggcaacgggactggcgaacgaagtgaggaggtcgatctccggacagatacgttgacctcgaccgttaatgaggaacgagtcgaggcagctgtacaccgttccatatgaatcgttagctcgcgcgcgacttatgaacgtctggacccgacatacagcgggtcgatgcctgtctgcctatagatcccgtttatctcgtcggcggtaaaatgtgaccagtctgccaacatgacgatattaggatccctctcggcggcagcaagttgatcgagctcccacgactcggacgtcatcgtcgtgaacggtttggctcgggatttcgcagggtgaatgaggaggggaccacggaaaccatccgacagttgagagtgatagtgggagtggtacctgcataagaacactacgataatcagcagacttcagcgggcgattgagtcccgagctttgtcactgaccagtactgcccgtactgcctagccgtccagttgtaggtaaagctagccccgtcttcgatgggatattgcctgccgtcgaatatacagggcttctcagcaagatgatcatgatggcttccgacttgcgaccaactgacgtgactcccggaactccatctgcccagatggtaccttcctgaatgatcccatgggcctgcatggtagtcggttggcccagcctgttgttcagtttgatctagagtcggacgtgggtcttgcgagtcagatcttgcccagcataggacgaccggaccgacccttgactcacgctgacttgctggccttcctccaactcgattaatggaccgggtgtttgtccgttgatcaagatggctggtctcgtctccccgttcgcattgacatctccccaggtgacggtaaagtcgtaaaacctgacgggccaagcctgttgttgttgttcttcttcttggtctccagtcattcctacggtagcagttgatgtcaaggtgttcaaaacagccgaggtacagggattgaccaaatcggaagaatagacgacgctcggggcgaaggtgctaacccccgtcgtacccgtaggataggaattgccgtcgacactggaacagtggactccattgaacgagctggagctagacgactcgtattgagaggtgactgttgcctgccgaggtacaacgccagcagaagcgatgccaatgacgatcgagaggaagagagcggtacacttgatcatcctgatgaaagccactgaacagcgaaccaaatctcgaagccgtcactcgatgacttgctggccgtgtgtcggcttttctcgacaggtcagacgcccaagcgaatgggctgatgatcctcatccgtatatgtcgaggtctttgaggcaaagtcgattaggagctctctcgaggtgcagcgcgttcgatttccgatcgatcgatcgtgagaattgtggctcgacgtgagaacgatatgataggtccagttgaagccatttttggtctagccgacatgataatcttctttctgtgccgtttcaagagcgactgacgatgcccgatgtcggtgaacacatgtgttgcatgtgagatctatttcgattccgaagtctgcgagattcccacgaagtgcccggatgtcttcggcgtgctccagacctagacttatcttgaccgagcttcggtctttgcccggcaggatcacgcggtcggccaggggagaagagatatcttggtggatattctccgtaagcaaaacgtcgtggttccaggcgacgggatgtccacacgttcgccttgtccttgagaacctccaccgcatccagatcagtgcgaagagccgaactactgattactgcaatcctgcgtctgtgtagatcgctgggatagtatcgacgatgaggtacgatgagttcttgtgtttagtgcgaattatgtggccgaaccccgaggtcgggttcccgatccccgatttgtcacgtgaaaagagttcgccatgtatttgagacccttgtcacttcaagggcgatccttctgacacgtccgtgcaacgtccatatcacgaccattcctcttcttgcgggacgacgtatatggatctatgaatgtccttggagccaagttcgccttgtgcggcaggttgctgaatgggatacagaatcggaccaaatttgagagcggaaggtcgctagcatcatcccgccgagcgttggacccgaaaagactcgatttcgagtcaaagtggagctcgggacgagaggtgcggccggggaggtgcaaggaacgaatgtgcaacgactccaaaatcagcgacgcagctctggacgcctagcgatgtcatcggtcgtcctcttagttcgcggggtcctcggcgacatagcaaacactcggaaatccccgcaatcggcgttcatcctgcgagtaggggttagacgcctcgaaacccaatatacgatctgtttcgactgcgatggtagtgacccacgttgaccttcagacaacgcatgatgcatgatctgcacagatgcagctgctcccgcgacgtgaacctccaagggtgtcccaacatatagcgaaagcgacgtcatctgctcactgttttcgccaaagcaaggttgtgtactcccagcgaaacgcttgatggccgagcggcgagccgcgaacctcgaacgcagaacctggttcgtccggaatcgcatggctgagaactaccacacgtcggagctcacttgcggtcagacatgtatggtttcgatgactcgaagctgtgtgacatgacttcgacgcacgttgaccggcgcgttgtctgccagttgtagccgacttgacggggccgactcaaccttgttatatacgtacggctagtcatcggcggcaacaatgacgccgtcgacgagggagatgattctctgctccacttacgcgggatcagtgggcagtgggatcatattcaggttgaacattccgtcgaacgacccactcgtcgctgatcgcgggatcacaattgataccgatacggcgagcatacgaagttcaaacagatgggcaccgaaagctcatataaaatgggtcgacgatggtgtactgcaaaaaggtttggccggctcccgacatctgtcagcaagcatcagtctatactccacagccaaccacctgaccatgaccgacaccactgaacagcgtacctgccatcaactcggcgtcgacaagccatacttcgaagacttcgaggtgagcagcaaacagagcgcatgacaagcgcatcggtgaacgacccagtactttccggttcgcacgcgatcttcaggtcgtcgcaggtttctttgagcagcaagaaaaagatggcgtcatgaagaagccctcggagctggctgaagagagcttcggtttgatcgacaagtcacccgagaggtgggagaactttaaaaaatcgattaaaggttagtccgatgcgccagatctgcttggatggcggtcgcttgatgggtcgcttgctgactaggacggggcatcgctaatgtaaaccttttcagatcttcgatcggacgctcccgagaacgtcagttacaaggtgttcttttgtggtgcgttgtgtgcgcgagtgattgcgcggtccgcacgatctgatcataggctgtgtcttgatttcaggccgacatggccaaggatggcacaacgttgccagcgattactacggtgacaaatgggaaggcgactgggctcagaagatgggcaacgacatgatcacttggggacccgatgcagagcttactcccaaaggccgagaagaagcgcttgtgagtcgttagctcgcagattggatcccaatagccgactcacctgaacaacttggcacactccgacagaccctacagaagggctggaagaaggagctggatgctggcgcccctcggcctcaaaaatggttgctctcgcccatgacccgggctgccgatacaatggcgcttacttggggaggtaaccttcgaaacgagacccctgtcttctgcgaggcaagtccatgagtcctcgactgcgatacatacatggtccagctgacctgataccgtatgataggctcttcgtgaggtctacggcatgcagaccaatgaccgacgacgggacaaggtgagtcgagcgtctatgactgacggacatatcaaacccagccttctgacccaatctgcttgtaaaccaggactatctcacgtcccgcttctaccagtgcgattttgaagaggacttttcccatggggacccttggtggaagcccggtatgtagtcgtcatttttgccagattcgcaccacactgactaaggtggtcgtgggcgattctattagacgagagagagacgatcgaacacagtcacgagaggctccgaggattcctttcgtatgcttttctcacgcgcgacgagacttgtgagtcgaggaacgggaaccgcaagctgccagatgctcatggctgctcctacaactagacatctctgtcacctcccattcctctaccctgcgcgctttgcttgatgtgcttgatcacccgcacaaagagtttgagactgccgaagtcatccctttggtggtcaaggcgactcgccgggagtcggccaaagagtagccgagctgctacgataggttcgaaaagcaggcgtacaagcgggggaactgcgcttgcaaacaggtcgtgctgtactgtatcaaattgtgctcgctcgagtgtcgctagtgatattcatctgcatagtcttcatggtgtgcgacatccatctggttcaattgttctttacagaattacctcccctattcgttcttgagagaaatgatacagttgaggctttcgtttgcttctgatacagattctccaagtagtaatccagtgggtctcactgttcggccgcattgacgcctctaggtctaggcgcaaatgttgtactgctgactctggtctccggtaggcgactcgtactgtaacgggacaaaaggcgtcagctcgaacggtgggcggtaggtcccgtgatttctgcttacttgaccgccgccttctccatcctcttgaaggaccggctgggaagggttgcagccataaaccgactgtcaatgcagaagcccttttggtaagtaagtcatgaacgatcaatatgagcgccttccagactgacggggatcgtgggcagcagccttctctgcaaatacttggtagcctcggagatgaactcattggactctgtcagaagatataggctcagccaatcgagcgagcgagctccatctgatcgtgtcttacctcccaagagtgccgcggggattccggatgtgataccctggtagatggcacatccgatctgaggcgcctgcgctggattttggaggattccgaggggattgggtagcgtcaaccgaggtccagtaaggtatgtgggcaacaggttggcgactagctgaaccacaccgtaagggtaggatcgcctgtaccaattctcagggaacctctcgggaacgtagcaaatggtacccgagctatcggcctgcataccaaggaacggcgcgatcgactcgtagttggcgtttccaccggcgccataggtcccgtttgagaaaaagtttggaatgaaagggtactcgcccagaataacgacgatcgtgtacctaagatttaaggcgtcagcttgacggtcaacaggtgcttcggctcaaccgccgacgcgccacactcacgcctggaagtacaacctaggattgtcattaattgacagctgggcgttttgaccatagaatttgttgagcgtgtcgacgtcaaatttgccgccgttctgcttggctaattcgatcaagcgcttgaaccggtcggggtaggcgttatggttgtcgccgttgttcgtataataatcccggcgggtagccgagatatccccttcgcatcgggaatgtccgtcaagaccgtactgccttcagatcatcgagtcatttggtgtgtgatgctcattttgaggtgagtgagtcatcgtgtctcaccttccaaactccttggtaccgatgccagacgaagagtacgtcctgtcatcttcgccaccaagagagaacgtctcggtcgccaggtttcctccaaaagtaattgcaaccaccgcgagtaaggtggatagttctgtttcggacgcagaagatcggtcccaactctattcgattttgttttggaatgtaatgaacgcaccagttgccatgttgaaaccctcggcagtggcctcgatcacctgaccagccgtgacgataccgttacgaggcagatctatacacgaatacaggggagcgctggactcagcgatcatgccagggagaacatactgggtagcgccacactaacacccatggttggccagagtattcaaaccggggcaggggcctcgctggtcgctaggacccggtgcctatcgtgacaggatgtcagctgaaagagtgtgagcgcgagacagcgcttgcaaaacttgcttgaaagggatgcgctgcgtcaggcctcttgtcttcgctgcgaacggtcgccgcgccgagagagccgagaagaccttcgagaagacctcccggtccggccaacccctcgagggtgtttccaagggtttcggtgatggggttcaagagcccgccaagttgacgtttctcttcgcgtttagggactagtaatgacaaattgggtatgggctacctccgccaaagccctggttcggagttcactcactttgaagtccttcaccagccatccaaggatatgcagtcgcggtctgtaggccggcctgggacaacagtcccagagccaacagctttgaaaaggaaggcatggtgatggaagtcggtgttgacttttgcttgaacccttccagcttctatttactgatacagacagacagacaatacctcgctctatatagtaattcaagaaagcgctagcttgtagcgacgcttgacgggaatcgcggactcggttgacagtaaagtgtctctgaaagccgcccttgaagaccactgcaaaagtcattgttctctacgtcagcaatatggctatggctagcgcgtgtctggtcatgagatctctttcggtccaatcgctgacgctccattcctctcacaatgaccctatccccagcttttgctgcgaccctcagccgtagcttctaggctcaagcaaccgagatgaaacgccgagacgagatgtgctggctgacgcgctgtcttcctcgatcgcttcagccggtggatctagcgcccaacgcgccttgaattcattcacgtcatacaattaggcgggaagcggattgctccgggcatattgacgacgcacttcggctagagaacaagattggcatatgcatgcgatacaacgaggcgcttggcaacacgctagaatgatacggaatacaaaaggagaccgaccggtcgaccgcgcacgacctctttctacagtttgctgttgctgacgtcaaccgctgtccggtggagtgcggcatcaaagtatttatcgagcgcctcccagccctttgattccagaggcacaacaacacccacgtagccgtccggtcgacagaccacgattccaccttcgggtaggccgtacttgatgtgggctcctccgacgcgagcttccgaaaagtggtcgcccaccttcacgcctgccgactcttcgtcgtcggcataaactagcgcgttcaatcccgtcaacggcttcaggtcctcgatctcaaagttgaacctcgagtccttgatgatcgtcaaaaaggtaaagtacgggttgatctcgtcgtatccgaccagcccggtgttcgtggcagcatgaaggaccttgcggttcttgggcatggaagcttggtaccggttgacaaagctggatgacgacgtgaggtatttcgaaaaggcttgaagcttggcaaagttgtccttgagcttgccagccaggacgtagatcctgaagcttcctggggcatcaaactgcacctcgtggatcagacgaacgggctgcgatgtcatggctcgagtgacgctagaaagattgccgaaagatgtgagccgcaagcccgccgccaatcaagagagccactacgacgactcacgtggctggtcggagcctctgtccggcttgcaacttgagcttgggaagaggctcgaggccgattttggagagctcgtcgttcatcacggtcagagccgatgagccataattgacaccggcacccgtggtgaaagcagcgtttctaatcgagaccgcgtcgacatcagatagccgtggcggacagtcgggcaagagcgcgacgactcacctcctttgaacctcgataaagtgctgcttgacctcggccttgctcatcttcgcgacctcgggagagttcctgggaacctctcccgagaacagagcggcatactcttcgtcaaagtcgatgagctgcttgccaatcttccatcgctcttcgttgtacgtcttgagcagatcaggacctgccaggcctcgaagcaccaaattgatcttgaacgacaagttgtgcgcgtcgatcaaggcagtgttcataccctgccctgccttgggcgagtgggtgtgacatgcgtctgtcgagacagtcgcatcaataagcttcaccacaaaaagtgcttgaagagttgctcaccccctgccataaatactcgtccctgtacgtcgtacttgttgaccagcctctgtccgatggggtaggcgctccaccactcggtcttgacgaactcgagcttgtaaggagcaaagatctgttccaaggttgcgcgctcagccatggtcgcaaagtcgtcatgacccgatcgttatcgctcacccgcttgtcggcatccataatatcctctgcggtaaccttccacctcatttcctgcggatccatcgtgctcttttgtccattcaacatgttgacctgggtgtacagccggatcatgggctggttgtcgatgttgttctcacggggaaagacataggcagatccttggctacagagcggtcgctaaccgtgtcaatagagcacgtggaagattccgatacagactgtctcacctagcgctatgaatggcggcgatctttcgaatatcgggaaagtcggtcttgaccactaaagacgtgacaaatgggtcagtaacggccgcttggaagcacagagaggtaaaacgctcaccaaaatcaccagccccccacagagtgctcaaaagctcgccgtcgaaggatagcccatgtttctcaatgccaaagtgtcgaacggcgcttcgaccaccatcgcatccgaccaagtacttgcatttcaccgatacaacgtcgccaccatcgctacctccttcggaagtggaacctttggtcaattctacggtgaccgggtgagcgttggggtcgttggtctcgtcgtcgattgtgtaagacttgaagctgaaagatcgggtggcacggagaccgttgcgttccatgtctcgcaggaatgcctcctcgatcatccctaaaaaaggcctagacccgtcagtactgctcggctgtggacagtggtcacacctgctcaccctgctgtaatcctagcgtgcaaccgtcttcgatttcgaggtattctggaaagctctgcaccctgcggtctcgaacaatcgtctcgttgccgttctcatccgtcgatgagttccagaaggttcgctcgtaagaagccgccgattgtcggacgagctcggaaccgaggggctccatgtttctatgagacgagtggtggcgacttagaccagggcgggatagagaacaagtgtgcatgtgcaacctacttcaaaacttcgattgtcctcggctggattccgtccgcacgaccagccgtcgtcggttcgtgccttgaatccacaatcaggatactgtgacctccgaatcgagccaatgcagtacagagcatgaggcctgcgaggagagtgtgtcagtgtggaaattcccagcgatcggagccaaaaacccagcgaacttaccggcaggtccggctccgatgaccacgacgtcgtattcatccttggctacggcatcgttgtgaggcgggtagttgtgttcgtctacaagacgttcccaaatatgagcagaccgtgctattcaactccgttcgaaagtctcttacaggcggctcggttcccctcttccctctcgtcaatcgcagaaatgttcgaagtcgtcatgtttgaaatcgagcgatgatggattgtgttgtgcttgtaggaaatgatggatagccataaacgctgcacctcttcagaattcttgggaggatggctatatactcgggctcgtattcgtagaagcctgagatcggtaggcaactctaacgcaggctggacgtcgtgccccgctttgagcgcgatcaccgatgcggggcaaatagtggctcggccccgtcattaccgtgctgaagacggacatgccattgttttttacgctaatgaactaagatcatgtccgtctttgcagagcggggcgattcagaagaggggcatagagtgttcgtacaacacaacaagcgaggacttcgagggcgtttcgaaaacatatccaggctcatagggtcagcgacctagcggtcggacaagatgttgacggatttacgccgtggtcccgcacggaaacagtcgatcgaccgacgtgatccattcactggtgcgatcgggagaccctctgccgaggaacggctgggacattcaggatcaatcgtgatccggatcggcgagcgcgaaaagtcgttcattaagcagttcatctggtatttctatatgtatcatgcgaataccgtgctaaaatacactcgagtctaagcgcttagacctgcttctcctgaactgcgctggcgatctcaaacttggctcccgtcttggccttgacctcatcgagtgttgcgccaggcatcagctcgatcaaagtcatcttgccagcttttcggtcaatctcgaacacggcctgttgttcgacgatgtttcgatgagcacacgctgatgctcttcaccttccgagcccgacgactattttgacttaccaattctgtgatgatcatgctcacgcaacgggatccagtcaacggcaacgagcacgtgtccaagatcttgggtcgacccttcttgtcgcagtgatcggtcaccacgatgaccttggtctcgtcgggcgaggagacgaggtccatggcccctcccattcccttgacgagcttgccgggaatgatccagttagctagatcgcccgcagcgctcacttccatggcctgcaagacgggtcgtttaggtacattgcagtctggccatctcaacactctgcatcgactcactcccagcaccgagacgtcgacgtgaccccctcggatcatggaaaacgactcgaccgagtcaaaggttgaagctccgggcatcaaggtgactgcagtcggcaaggcgatacaatcacatgagcgggtttgtccacgtgatctgtccgacgaacgaccaaaacgcaccagtctctttgccggcgttgatgatgtcggcgtccatctgagctcttgtgggaagaggacccatacccaagatcccgttctcgctttgtagccatacgttccttccctcgggcagatgattgggaatcaaagtgggcatcccgattccgaggttgacatagaacccgtcttgaagttccagtgccgctcgctaagagacaccagcggggccgcgactcagtcggctgtcccgaatacactgccacaaactgctcaccttgacgatctgttcccgcttggccctcgcatcacccgttcccaagctggccttctccttgtcatcgttcccgggttcgggcgccagggtctcgatttcgatctccttgggcgtcgtcgccttgacgattcggttgacgtagataccaggcaggtggatttccataggatcgagcgatccgatggggacgatctcttcggcctcgacgatggtcatccttgccgatctggccatggcggcactaaagttgtgggcggcgtacctaaagacgacgtttccggcctcgtcgactttccacgctcgaataaaggcgacgtctcccttgatggcctcttccatgaggtactgcttgccgttaaactctcgaacctctcgcttcttggggtattcaacggcctgcaagcggaatcgcgtcatggcatcagcgggtctgacccataatgacgtacattcacctcgaccgaccgactcactttgccatcgggaccgttcctcatggcgacactgccatcttggacgggagttccataaccggtcgcagtgaagaaggccggaattcccgctccagcagctcggattcgctcggccagcgtgccctgaggggtcaattcgacgtcaatcttgcccgtcaagtattgcttctcgaactctttgtttctgcggagccattcgggtcattagaatcggccctgacaggggaaatctatctggcttaccctccgatgtaagatgcgatcatcttgccgatctgtcccgaacccagtagcagacctggccgggcaatctggagcgtcagcctcctggatgcggatactctcctcgatattgggctcacccagacccttgtcaccgactccggcattgttgcttactccggtcaacttggtaacctcaggtctcttggccaacgcttggatcaacgtgttcggcgttccacacagtccgaatcctgtcacgcacgtccagcttgtcagtttgcatagcactatcaaccgccggccgactcgagctcacctccgctaagcaagatgtcaccgctcttgacgtccttgaccgcctcgtctgccgattcgtacaccttgtgactcttagggacgtgctgagcgtaggtacggatccaggtccgtcctgcgcgactcgacgtcgaggccaccagagagttgaaacggcgggagagaatagtcatttttagaagtgatgatcttggacttggagatcaacggtgcgagacgaccacgaccttgacgcagagggccgaccgtcttgaaccgttcgtctttgtacgatcacatccgcaacagatgttccggaagtctcgcgtccggagtttcgggttgagcgttccccgcttttctggccccgctcagcggaataggggtcaattgaacgccccgctttagccaactgggcgacagctagagggggggctcggccaaatggtagctccagacgtcacggttgtagaggcacaaacgcaagggcagggagcgtagcgtcactctcgaggtagccggggctcggggagaagcggggacttgtcagagtgggtggacgttgtagatatagaaagagtagccaacgaaatgcgagcgatttcaggacatgactagtgtcgacccgctctgtttttctctcgcgaaacgtttgcgaactacaactggaaaccatcctctcgccatcgtgaccatgttgacccttttccagacattcgttgtcgccctcgttggtgccgctgccgttgcaggtgagccgaaccagaccgcggccgacgacccacgaacgaacgtcagcagctaagccctatcgaaacccttcacagcccactcccacgaagctcccaaatcagccgaggaaaaggcttccttgaacaagttgaaagaagcctcgtatctctgcgcacctcagattgccgcctacaacgctcaacgtgaacgtgcatgggcccaaaaggtcctcggcggagcatcctacgaggaaaagcggagattcgtcgaaggaggatggaacgacattgccaatcaaatgaagtcgatcgatggcgctcacgatctcgacagcggcgacaagcgaatcctggcatgtgaagccgttgcagggagcaagatccgaaatcatacctgcgtattggcacccgaatcgaccgagggtccctacttccatgttagtcagcaatggagatgcttcgcgcggcgtagctcacgctttggttcattgacaggacggagaacatcccatccgatcgaacctcgccgaacttaaggatggtctgccgatgtgagcatccggtctgcgccgctcgaggagatggcaacggctgacatccgaccgataccgcctctaggaacatgcagatcggtctgatcgacgtcaacacctgtgaaccgatcgagaacgtccttcttgacatctggcattgcgatgccctcggtaggtcctggacgtgaggcgtttgcttggatggcggtctgacgacctcggccttgtgacgtagggtattatgctggacacccctcaccacgacctgatctcatgaatgaggagcccgccaaggagggacaccgaaaaggactcttgtgtgagttttgtgctaaggaccccatgcagaccgtcccgtactcataccaaatcactctgcctcagccgcttaccctcgggaccacgatggagagacatggctccgaggtgctcagatttctgatgccaatggagtcgtagagttccagtccatcttccctgggtactaccaaggtcgggcaacccactggcacattcgaatccatcccgactacgaggtgcttcccaacaacacctacatcggcaagacgctcgcccataccggccaaatctttgttcaagatgacatcaactcggccgtcgacatgatgtacccttacgtgagtttggccgtgaaatcgatggcaagcggcatggcctgacaagttcactcatctgcaggtcaacaaccatcttcgaactatgcccggtcgaggacgaactcgaaactggcaagactcgttgaacatctttgaagactcgcagatcggaggctaccaaagcatgtgggacatgcactacatgggatccgtcatctcgcagggtctccagggattcatcaccgtcgtgagtctggttcgaggcttgaacggacgatcacgtgtcgctgacatcggcaccgcccttctcgcaggtcatcaactcgacggccgattattcccaggtcaagtggtctgtagagcagggcaaggacaagttccagtccaagttggccgagacgaccgcccatgtcgaattgtagaagacatttttcgattagagagcgatgagcatcaataatcaagcaatcgattaatgcggcgatccgcatcacgtgcatgtccattctgtctatcaaaccaacacttgaacatgtctatattttgtcaagctcgagtcggtagaatcgcgagatcccgatgggactcgcgactcaagagctgcggttgggagcctggctgccagatcctttctcgatctggactagtgatctcggtgaggatgacattcgatatcgcctgcactgctatttacaaccactctatcaaacctccacaatctcactttccagccttgatggccgcagtagtttcgtactctttgtgtagagcgaacggtcggaagctgcggtacgtggtcaacggctcgagcgcgtcctgataccacgactcgagtgccttgtattcctgcgactcgaggacggcagggtcggagaactctgtcgtcgggcccgaatttcggtcagcatgcagtggttcgacgtggaccggatcacaaagggaagcgacgtaccagagacttcgagtacggctccgacgtcggccttttcgctcttctccgcggcgactttaagtccactcctgacagtgtcgaccatttcgtatctcctgaccctcatgaaccctggcaacgccgcgagcctgccctcggctgattgcatcagcgcatcgagctccgagtcggttccggaagaattaggggttacggcgtgaaagacgatgactttcgggtggggcgagctagtagtaggctcagagtcgggggaagaggccaacttgtagatctgtgttgactcagacgtgtcagtcgcggcacagacagtggtcggtcgagtcgagaccttaccctcctatcgagcacggccaggttagacacgagctttccctcccgcggacttcggttcgccctcaacttggtgtactcctctctgccgaacaatgtgttgtcactaatagagtacatcgcgccccatttgggttcctggccatccagagccccgaaacgagccgccgtcgtgaaggcttcgagagacgaagtccttagggggatatgctcgttgtcataccaatctgctcatcgaagatcaaatctatcagcgagaggcgtaggtcgacccgagtaagggtcgcgattcaaggtggacgtaccgtgaaactcgggttcggtaactttctcgccgagctcggcaaagacgagtagaagtccgggtccagcttcaaagttgggcatagtgaatgtttggaatgactttaggatactgtcgagctgtcaatctgccgttcaatcgtctctatcagtcacgactagatgacttgaccctttgaatcgattggacgctgaccgactacgactcggaggcttggatattccacctccggtccccacccgaccggatgatccactttctccccgcaaaagccacgtttccaatgcttccgggagcaaattacatccggcggggtcatctcaagtccccgaattcgctctctctactccatctattccctaaaagaccgaatgctctcaagtggccagcagaaattgactttgggtggtaacgaccaaggttttcatcatccagccaacacctcctgaagtcatgcctcgagtaccctatcgctatcctgctccctctaccgatgcagtcgcggatcggatccgccagcgtcgaggcgtccgtggactcaccccgctcgacgggatgctcttgaacgctcccaacgtcgccgatggctggaacacattcgtcggaggtcttaggacgaggaccagcttgagagacgacgtgagggagttgatggtgagtccaaggaaactctggtatgtggcataaaagccgtcaactaacctgaactcgcttgatcagatcctccgagtggccgcttgcaacaatgccgcctttgagtggattcaccacgagcacgttgcgaggaaagcaggaggcatgtcctatgagcagctgtcgattgtcggccggcccatcgatacgcgagaaacgtccgactactcgtactccgctccccaattctctaccgaccggcaaggccagggagagacgctctcccccttgcagtccgccgccttggcctttgccgacgcttctacccgcaacgttcgtgtaccctcgaacgtatttgatgccttccgcgacgccttgaccaccgaattggaggaacgtccggccaaggacaaggtctcgggagagaacgtcacggtagaacagcagatgatcgaagcagcagccgtcgtcggtggatacaacctcgtctcccgtttcctggttgccctcgatatcgacgacaagtgcgagcttgcggttcccatccccgtcgtcgccagaatccccattccatcatttcaagctggatcgtctggtcctgccgaattacatgccatctatctccctgcccaaagcgataagaccgacaagacgatcgtctttgtcaactcgctcctcaccaactacagaatgtggagacacgtctgggatcgtctgaacaagcaatacaatctcgtcttctatgatcaacgtggacacggtcagtcatacgtccctcccgccggacaaaaatgcacgatggacgaactcgccagcgacgtcgccctcgtccttgatcacttccaggtcgagagagcgtgggcggtcattggaatctcgcagggcggcgctaccgccttgaactttgccatcgaatatcctgagcgagcgcacaagatcgtcgcctgtgatacccaggccaagagcccagaagccaatatcaaggcgtgggacgaccggattgagctcgctagagctcaggggatgggagctctggctgaagccacgatcccccggtggttctcacctgaatcctcgttcgatcgatccaaggactatgaatggctgcagaaaggagtcgagagtacgaccgtagacgggttcgcagccggagcgggagctctacagggttacgacctgttggccaaggacctagtcaacgtgttggcgaagcgtgccgaacgcagtgtcatgcttctagcaggcgagatggatggcaagctacctgacggtctcaaggcgctgggtgaacaagtcaagggtgccggtggcaaagtcgacgtacaggtgattgccaaaggaggtcatctaccttgcgtcaacgaacccgaagcattcatggatgtcgtttgtgcgttcttggacgagtagaccatagttgcgatttgtagatacgtcatctatagacgttttttattgtcatatgtccagtacaaaacggggatacttcttctattctcatgtcacaaatatacctgcagctcccatactgtggaagagattgtggttgtcagtatgatgcaagcaaggcaaaagtccgcatggcgatccgactgacccggctccgacacacatcgatgtgaccaagacttgaccttcgccacctcgtcgtttgagttcagcgagacccgtcacaacttggcggactccggtgcaacctaaaaaggtactcaagtcccggtcagcggccttcccaggcaagcgaacccgagaaccggcgaaactaaccgagagggtggcccagagcgctggcaaggcataaaatgaagaggttagttaccgcatcagttgcttgtaaagccaccatcgactcacatggctccaccattcacgttgaccttttcgatatccagtccgagagtctcaacgcagtaagcgtacatcgatccaaaggcctcattaatctgatgttgggcgggacgaacgttaaggcagatcgcgtatggttttaaacctgtgtctcacctcgaagaggttgacatcctccttcttaattcctgctcgctccagggctttgctgcgggcaaaaaaaaagcaagcccttcgtctcagcaacatcgaatttgccagatgggcgccgatgacactcacggaatagcgacgactgggccgattcccatgacccgaggcgagacaccgaccacgctggtagtgacatgcttggccagaatctccaatcccagctcttccgccttccatcgcggcatcatcacgaccatggccgcaccatcggtgacctgactcgagttggctccggtactcctcgcatcaccaaagtccttgaaggccggcttccccgccttcatcttttccaacgtctggccgtgccggatcccatcgtccttgtcggccacgatcttgctcctctccgagttgggatccttggggtcgctgaggacagaagtctcgataggcaagatttcggtgtcaaacttgcccgcttgctgagcggcagaagctcgattgtgggataagagaccgtactcgtcctgcttggccctcgagacatcgtagtcgatagcaagcatctcggaagtccatcccataggcttggcacagtctacagaggaagcgttatcgagtaccgcttgactcccgaattgaggagtcggtcgagcgctacaagtcgtcaagaaagataagcctttgaccgagctctcgacttctcctcccggtcgaaacacgactcactgagcgctcatgctctcgtagccgacggcgacaccgacctcgagatccttgcgggcaattgaatcactgatgtgtcggatggccatcaatccgctcgagcatagtcgattgatagcttggaccggagtggtctcggggaatccagcggcgagtgacgccgccctgacctcgtaggccggggaaggaggatgacaggttcctggggagcgcgtagataccatgagctcggtctttctctcgatagggagcgatcaggctcaccggtgatcaggtctccgacgatctgcttgtccaccttgctctcggccattccattcttcagcaattcgtagagcaggctatcggacgaggtatcccggaacgctccctttttggccctggtcagagcggtacgtttggcgtactatcgagagatattcgcgatcaatgctagtcgaccctagggctgcccagcctgactcacggtaatgaccacatcgtccggtgaattttgtcgaagcttggccagatctcggactacgctcgaggtggccagactgcgtgcacgattgctcgtggtgacgctgagagagctggctcgggaggtgatacgggcgaacaacatgatgcggataatttcttctcgaactcaagatctatcgaagcttcatccgtctagcctgactctacctccagctgatgatgaccacgctactatatcgccactttctcaatgtcgagcatgggactggggacgatccggattctcctcttggttgtggtccgaagcggggtcatcggaagcaaaaagcgggacccaggccggaacggatccatttttacggatacaatcggtgaaacagtttttccgggcggggcacgtcatcagacaggtccaggtccaaagaccttgcgaaagtaggtggaacattgacgagatgatctctgccatgacatacgcaatttcctgatggctctgaactagatcaagagcaccctggttccaatcctacgacttggctctgatctgcacgagactggatgctttgaccgacccgatggatggctccactttcctgacgtcgacgaacggcgaggtgattcctatcttgtgtggtgagcagcagcacacgctcgattcacaaactcgctttctgacctccagctctgtcttgtgggatcggtccaggcactttcacttcggtctacctttatatcctttctttctcgaccctcacccgcaagctctcgattcacaaacgtatagaagcccaaggtcctcaccaatacctcgctctgagcccaggacgagacaccttgtatgctacgagctgggcatggccgcctagcctgtacgctttcggcatagaacaagatcaaaaggatgagagctctctcgatgaggcatggagattgaccctagattataagggcaagacgccaatcagtgatttcaatctcttcactcgaggtttgagcaggcttctcatcatgtatctggcgatattcgcagcggctatctcttcgtacatcgccattcacgataatcatatctactcgatcggaggtcctaccggggaaatccacgcggcccctgcttcggacgacgaccatggcttcgggaacaaattacaggaaatgctgtacgttccagaagacaagcttgaagggtgggagaagacgaacaaggcattggtgagcatcgaatagactacatttcggtctccatcagcttatcggatttgctgcggcagaggtatggagcgcacgggatcgaattcgacagccgtgggagagcctacgtgccagacctgtaagtcatctcagacccggttctcccgtttctcctccccgatcagacctgacttgatggatgttgcagcggcgagaactgcatctggattcatcagtcgaggccggacggtaccttgacactggtggacaagcacgtttcctctcgacctcacgatgggccgagacatgcggtcgtcggacaggcaggcaagaccgtctatgcagtaagtcccacgctcctgcgtgccctcagccgtgctcttccatcagaactgaaaaggtcactgaaactttgcaggtcacggaacatacgcaattcgtggacgtctatgatatcaccgaagaagggctgacgtacgtccactcgtcaagtctgataccggaaggtgagccggccgcaagtacgaatcatcgacccttcgctaagactttgctggacggtctggtaggctccaatccggacgactaccgtggagacaccatccgtacctctccatccacctcgtttgtgtttgccacgacacggggcaaagacgtctccacgcacggctacctgtgcgcgtacgctgtggactcctccacaggccacttgacgtcccccttttccactccgagtgccgttttcgaaacgcctaccaacggcgggcgagcgaacgctatcgaggtcatagaggcacgagggcgagggcaagggggtgagctcgaatggatcgtgttgaccgatgagcaggagggtcttgtgttggtcatttcgtgggacggcgtcatattcacagaaattagtcgggttgagctggaaaaaggggatggggcgagtcatgccgtttggctcgattgacgtaaaaggataatattgccgagctgttgtatttccccaatgtcattcgtgctggagctatcaatgtgcaatcgctgttaccactgccacattcatagcatatcgagcagtgtcgaaagagagtacaaggcgaaccttgagtatgcgacacaaagcactttgaagatggtctctgagcagagcagttctgaatgcgagaacgttcacgacaaccatcaagtcacgagcacactatgtcagctggttttttgcctcaaaagactctcaaatctacagaaaggaagcgagagcgacgcatcaaattgataaccatttgtggctcagtgacagttggcatagactgagtttctgaacgcgtatttcatcgaggattgcagctgctgttggataggtcgattgaacggaatgaggagcaacgctcttctagtgcatgtgccatgctctgacgccgactactacccgtcgtgtatgacttcttggacattttgcctccgtaacctatgggaccagacttatataggctaaagtagactacgggagtagacgttctgacctgtttaagtgcattcttctatacacctgacatggggatgtccgaatctatcgacgtgctgtcatgtgcggcatcctccgtagcagcaggaacaccaaaaactctatccactagggcttccatatccaagtcctcatttccgctcatgacctgggctgaggctggcagctcttccgtagattgtcgaattgcctctgccaggcaactaattctccatgcatttggtatcgtcgcgcgaagagttctcttccccatagcgcggtagatctgacacacgatgactttgttagtccggtctcgttcaagtcggacatctaatgtttcctcctgctgttcgattcttgcagaaagcgaaccgatgatttctgacatgtaagcccgccttacaacatttaggtgttcgtggattctcttcggaaacgacaactttttcccgctttcttgacaggcgaacgtcgaagcacggtacacggtgtacacgtctcgcgttgtgtcgacctcaaggtttgtcccagctgagctctccgtgtatcgaatgatcggattggccggaaacagctcatccgcttcgcggctcgtgtagcttccaatcccagtgcgactcattctaggccggacctccattgtcccatcgtctttgtatgtgtaagtcatatcttcaaagccccgctcggtaccgatggtggagcggctgttcgtcgcagttaccagggtcccgtatgtaatggtcggtataacgctgggatcagctgcttgtccagcttgattgcgtttacgcttgaccattgtatcgttcctacaagggacatctgttgggtaaagatgatgtatatttggctttcgattgtgttcaacgaacaaacttgctggtctcctcggctatcgtgtatacatatatatatacagcaatatgattctttgctccttggctggcaaggcattcacaacgtgatcctttcaagcaaaataccgccaccgatttcctgtgtgagccaaagagcacgcaatacagtcagactatgagcgcgtcatttgcgaatcagatgagcaaaagtgatgccgaacggaatggctctacagattctgcgattggccttgcaatgtacgagtgagcaagatatccagggcaccgacatgattctttactttcttttatcgcttcaaaattacgctgcacatttctatatggtctgctgcttcatgctttcgaaaacttttcgcccgacgaagctcctccatcggcacaatgtcaacatggaacgcgctttagtacaatcatcctcgtcattgctcgacctctctaaaatccggacaaacgattccgatatcttcgagcacagcgttaccttcctttgtcgccaacggtggcgaagtactactgttcactacatggaaacgacaagcaaagcttcacgatgcctgctccgctaagatcccgtcatcacggtgtcctgtacagtatcctgtacagtagttgggttcaaatccgaatcttgcatatatccgtcgcatacgaagctgatcagaggcttcaagttctcgggatctcccacgtcaggcaattgagcttcagtatcgacgccatacttgaactggaatatacgaatagcttccgcgagataactgattttgccgtccgactccaagttggactttggaggactcgcaacggcagctcggttcaattgatcgatgatctttttattttcagtatcccattctagcagttcttcaggggacacctcctctcttcgaagttgggaataaatgttgaagaccatgtgtgacttggagcgcgtcatctcctttctcaagatctcgatgacctcgtccttagggttcgttcgcaattgatatctatcgagggccaacgaaacggcacgaaatatggtggtaccgtcactttgggagtagtctacctggctctctgggggttttgtccccgtgttgattgtcaagatgagagtcgaggccgtgaccgagcggacctcgattggctgatcgagcagatagtccctgggaatgtacgtcagatcgttcttggtaaatcgagaatctgtgttaccccacgatgagtctggattggtatctgtttcctcctgactgaaaggtcgtttggacatcgcaaagtgtggatcttgacgatcgggatgcgtctgatggtgtcgcttagggaggctgttagatagcacagaatcatcggacgaaagaccttccctctacatgtatatcatacacacacacacacatatatatatatataccgatcgatcatgccgtgatcgattctacagcttacaagcggcatccaactcctttgtcctgttcgattcttggatttgcaattggcctcagcaaaaatcgggggaaactcggacaggataatttggggtccaatagggatgcccgacggttgattgctcctagtgatatcatcgatatcggaattagcctttttctacggatgacgtcgtctctgatgatgagcccaacggtatcagggctgaagatgacgttcgacctgaaacatcaaggtagctcaggtggccgggggattgagatcacgtgattgcggttcggccaatgccgaaactcggcgacgaccttccctcggcgatcgacgtggtcaacagagcaacatgatcgcgatcttttcaccttctgattgaccatgcttatcctctcgtaggatccttacagacggctttatttagctctcaatatcatgggcaagcctgagaatcctgctccgccttacgcggcctcgatcggctgcctccagctttcccgcaatgaccacctccgactagtcaacctcccgcccgacctcatccctatgactcgcgacgtcatcaccacgcattggcccaagggcatacagaaggaaggagacttcgaaggttgctcttgggagttcaagtgcaaaggtaacccttgtaagttcattaggccagcacgatacgtcagccggcgtctgtagacctcatatttggaacgtctcagggcttgcccaaggagacgaggctgtcccgtgagtctcttttcactctttcgagtggacagttcagtggttgcacgctctgtggtgataatttcccatcgcaactattcagagctcgccgattattgatggcccttatccaggcgttcgagagagttggatggcacgtctatacggcctgcgggttgagcaaagaaccgggtgataaagtaaggctttctatcctcagcgcaaggctggctctccaactgggataggaggacgagacgagacgattccagtgctgcccgtcaccagtgcacgttataccagcgtaaactagcaaccaactgaaaccttgcctgtcgattccaggacaccatctttttccggcacgtcggtctccccttgaaccgccctttctgctccatctcgttcaacaagggcgaccgaatcgtgagttggtccccggtttcgtgtactgacaggcgcgacccggctgaatgtcatcgctacgttcgtccttctgtatcccggcagcgtctcatagacgctcccacggcggaaatctccagggcgttcgaaagcgtggcccaagtgagttttgatcaccgaattcggccttccacgattacagctgacgcacaacgacgcgccccttagtcctggtttctaggcgtgaaaacaccctcttccgggctattccatcgttcttccggtacgctagaagacccggggtgccaggagatcaagctcgggggcagcccgtggtacgctgtagacggtatcgaggtcgtccaggcgagtttctgtgcaagacgaacgtgttcgaaaagttctcgtcgcgcggtgtgactgattctgctttcaaatgccaggctcgagtactctgttgtaggttcttggagtctatgcagagcgtcgggctcgacctggtcgtcagcgtggacatgtcgacaggaggaggcgggatggatagtaagcgcccatacggatacaacgacctgtcatcgctgggtcgaatatcgctgattaacaatcctgggtgtttctcgtcatctcttatcagtgtgcacgtggttctttgctcctcgtgcttgatcactcgacgcaatcttgtcgatatagcccggactgtagtttgcaattcaatttcgtacatgaacgaacgtccctctcctgtcttgtatggtccgtctcctcttcctggtgccaggtcgagtcactctgcaatagttggatactttcatgtcggtagatcacacgtggcgctacccagggccatagtctgttcacagctctgcagacttcaggcgccgcatcgtcggataaccaccatgcaccatgtcgactcggatgacattggcttgagcgagccgagccgagctcaaccgataagatatatctgattcgatttgatcacggatcatgtataaatatgctctgtgaggtcgcgcttgagaacataagaaccattttgagcaaagtcttgtcgttgaccgatcaaaaaggtagaaatgacttcgaggtcgacatgtcgtgctcgtctccttgtatctcccaccaggcaaggacaggacccatcactttttcatcccaagtcgaacccaagctttactcgagatatccgggtcatttgacatcgtgtcgacctgtcgtcgaaagtctcccacgaggttgaattgtcaactagttaatacgcgagactcagtcgtcatcgccgaaacaacaacgacgaacatcgatctacccagaccatcctgtccagacacaacaactccttgtcacacaaactttttaggcaacagggcatagccaggtttcactgaagagtttgcaagagccggttcgagcctgttcgatagccccgtcatgttcggatcatcaagccgggtagctccaaggtcagtcgggtcaggtctctttgcaaccgggtctatcgtcgttttcagggggctgatcagaactctcaaactgtcttcccctgatcggatcatcttgtacatgacgtcaatctaccgtgtggacacttgccggtgatcccgaacatcgacatacaatgactgctacctgcatgaacaaccacctcctgtcttcgaacgcgacccgtttgcttgttcgttcacttatcgacacgaacagaaaagacaccgggatcgtctgggatttcgatacgatcagttccgtctttttcctcctcctctttctcggcatcgtcggtcagtcgctcggagtaaaatggagggactactagagctgatgactagctcgttctgtatctgaacctgatctaccttttgggtgaacttcagcgggcatcttccaccttactcgcaagggagccgctgcggccgaacaaaccaaggcgtccttgagggagaaaggagtgtgagtctgttctcatcctcgaccagatcttacctttctctcgcaaggacccgcaactcacgaacatctatggttctccttctcgtcctatcgactctgcaatatgcggcccatccgtaacgtacagcacgattgagggcggacaaatgcgtgtacagacgaccggggtggctcccaatcgggaagaatacatcgctcgtactcaacggtcagttaccccttcacgcccggtttgcccgcccactttctcgtattgaacccatcgaacacgctacactcgcagcgctttcgaacggtccgctgccaaattcgctgccaaccccgccgctctgacgtttggactcaaggatgacgtcctcggggcgacctcgtccgtcgtccaggggatatcgagtgtcaacccgttgaacggtaaattcggtgcgggtcgaggtgattcgacgcgggagaccggggtaagcatggacgggtcgtcgacgggtgtcactgaaacgtgagcattcgacgttactacggcggtcgattgatcgatgcatgctgaccgtgagagactgacttcgacgtggtatctactattgctcctcctgctggcttttacaacgtgactgttggtcacagccctgctgcttcgaaacgacaaggtgggatgggcatgtttcgccggaaccccaagacgacggtcgcttgaacgaacatgagggcgggttgtcgagacctctcaagaacgtaccaggcgttacgtacctctatcatcagcgtagacaaagtacgatctcgcgacatgtacaagatcgtctcgccactatctgctatgcggtcgatggaggcgccggcgggaagacggtcgaatcagagtcggcatccgatccgtctctacaagtttgtttttcgaatcgagttgtacatcatatgaagataccccatctagcctgttacctgatcgttgtgctcgctcagtgtctctagaccgtcagtcataggtcgtccaagaggttttcgttgtcgttgtcatatctttcgaagctacagaattactataatagagtgagtagataggtacaagtcggtcggtgatcatctggtttgacccgagattcgccgcttatcgacattggttaacctgatcgcaccctgtttgtttcttgcttcttgcttcttgcttcttgcttcttgtacctctcaatcgtttctcgccaaacctcactcttaccatcactgattactccacgttattgtgacatacaagaagagccatcgcaatagatcgcagagcttgtcaacccaaggccgtcggactcgaaacaatcgagccgtttcatcggggtggagaggcgatgggattgaagaggcaaaaggaagatgacattacgattacgaacccgacgaaactgaaccacgaaaccgaagatgagcattcctgcgacgcagaggtgagctctctctgaccgtttcttgcctgcaaggtggcggccctgctcgtatgtaagctgattgggacatatcaacggttcggatggtcagacaacaaccctcgcacgacgtgctcctttatcttctacgacaagccccccggtgctcttctaccgcgacgaaaacggagaggtcgcaccctcaaagagcactgctagacaaccctcctataacgacaaattgaacgaccacggtaagcctcttcgagaaagtcaaacttgcggtctttgcaggacctcagccagctcgataaattgcatcgcccgctcgtagctgggccatcctggttaggccaacagaagcaaggaaaccttgcagggctcctttttgaccggaattatccgcgagaccgtcgtcatcctccggccaggctggccgctgccgacatcatccggctcgacgagaaacgcatcgaaaccggtcgataccagcacgtcaagatggacgacttcgctctccctgtgcatgtcactggcaacgtcgtccctcctcccctgagtcccgacgctccccaagtatggcctgtatgggaatctcgcctcctcacatctcgtaggctgttggcaactcatgtgcctacactcggggatcatggcgccagcaccagttaggtctccatattgttgcaagcaatcttccctgttgctttcacagaagtggcttttagattttcggatccccttgttgccgaaggtgtggaatgcgaatgtagttttgaggtcgtctccaagacttctgagatacaggactttcgctttcgaccagcacggatcctgcaagggagggtcgacggagcgatccgggtgctggatttagccgtgctcgaccatgacaacagtccctttgtaatgatctacgaggttaagcccgccgccaagaagctcatggacgacggtacatacatcgtcaacactgtcgaccaagtcgatagtgccacagcaaaagaaggcgatgagcagattcggatcagagctaattccattcacctgaacaattgttccgacccaatcgtccttttgagcatcatcgggtgcttcttccgaccctacctctggatgaacaataccatcaggccatccaatttcgatgtgttcatacacgaatctcgggtatctacaagtccaagtccaaccctttggctagatttgaggacagacattggcaagaggacattacaacaggtcatcctggatgtcgttcagggtcagccttcgagtgcagagatgtatggcgtggatgggaacggcgcgtcgcaagcaagctgtgttgccaacgacgtcgatggtgggggcagctttgattcccggtcggtaagcattttatcgtgcgtatcgaatcatcgacaggcaagctagtcagtcgagtagctcacaagtgcagttgcgagttggattccgattccggttcaagatccagcgtcgtttgtatcgcggatgcggatccaacgatattgactgtcaaagaagagagactatattatcgaacgatacgctattgcttgttacactggaccagaattatttccccgtgacatgcaatcgacccgttttacaacttggacttcactagctgcccgctcgcacccgctcgtaaccactcgtccgctagcctgctcgcctcttctgcgatccctagactagcctggaagcctgctggaccgatcccgtacgcatgcacgacggccaccttgccccttgtcctcgtcgcgctcgtcctcccggtcttgggtcccgggatcaatgggtgctccttacctggcgaccgagacgatcgttcctccagctcgaccctgacgcctgcctccctggctggtctgagcccgacattgtgactgacgacctcgatgtctctccaggacctctccctgcccggtcgttctggacccgcgaggtccgggttgagcttgaaacagtcccgcaggatacgttcagagacggccaggtcgggcgaggtgttccattcgttcttgacaaacgttcctccaaggatgacgtggttgctaggtccaggtcgtgggatgatgtatgcggggaccgatggtttgcctgggatcacgtcggaacgaggccggggtacgagcgtgtcgatggaatgagcttgtggtagcgtggggaacgatatgcccacggactcaccgtcaggaccgacgttcaagtttctcgtccccatgtaacacctcttgcccttgcctcctgccaaatcgctcttgacgagcaccgtctgacccctgatcgggtagaccgtatcatcctcgacgccgaccagacttttggctccgagtccggtcgcattgacgacgaggtcgaccgtgagcctgccgccggactcgggtcccaatccgaatttctcaaccagatgttgggggagtgccagatcgtacgcctcgtccagcgcagatacacggcgtttcaagaatgagacgcccgagcgttcgagcgtgcgtgcgaggtgggcgatgtagtctgtagcatggaggacgaacgacttgaacttgatggcctgcttgtatcccgctggagcatctcccgggccacatcgttcgtactatcatgtagatataggtgagcggtcgaacggggaccagagtcaaaggatgggagggtcgagctctggctcacatcgggtacaagatccttgaaccagagatcctcgacctcgccctcgttccaaacatcgacgaatgggatcatctcgcacaagtctggatgctctttggcgagcttgggcagcctctcaaaggtcctcttgtcaaagttctgattggaaaagtcctcgttggcggcaaaggaataccagttgcacctagtcgtgagcgggtacgatttcagttaacgcacagtcatgctgatcaaggtcaatctaggctcacccagcccatggactggcgaatccggtgctgttgacgtcttccgccagatctttgcctacgacgagcggcaagtatcccctttctaccagttcgatggcgatggatagaccaagcacgccgcttccgaggacgacgacgtcgggctttgtcttgcgagatgagcgattctgttgcatggcgtctttgtctggccggtagtgtgtttcaaaagcagtcccagtggaaagcttccaaggacagaagcgagaagaggacgttgtgtgaatagagatagatatgagtgtagatttcagccaagagcgaccctgatctcggaccgaaccggccatagcttatcgggcgactcggtcccggtcagacttcggccgaaccatttcaatcgattcagacaaaattctcaattcaatcgcatggctaactataagctagctcgttgtcatgtggtacgactactacaccaggctacaaccatagagagactcggtgacctcagggaaagatcggatcgttgcaatacatctcgctcaagaatccctcccaattgaagaacgcctggttgtcggtgagaagcgcgccctcgacggcggtacccatcccagatccctgagcgaatggctgcaacaaaaacggatcgaattggatggccggtgcgatcccgttgatattgacattgacgagggactcggtggggatccgtggaggtggtcgagcgatggtcggcgtgatacttcccgctacggggacaacggggatatagggaattggaaatcagcaggaagccatttcgtttaagcgctgcagcctcgactcacattgtggcgtctcgacgatcctgggcgagactttcggccttgtgctggtcgccgccgtcgtgccggctgcagcagcgctcgtacaggcgtccaacctggccaagagtgaatccatgatcctccgctctcgcctcgatacggcatcatccctgccctgatcgaggtcggcctgcaacgtttcgacgcattcctgtagatgcccgatatactcttgatacgtgtccggatccggcacctcggccatatccacgctaatgaggattgacagaccgaggaccacggccgagttgaagagtgcccaggctcccacaaacatctgtctctgctcggacgggttgaacgtccgggtccacatcttgcgcgccctcaagtcttgtaccgccgtgtccacacagcgctgccagctgtatcgataaggatgtttcttcttgcgtagcgccttgagcatgaacgggcgatgcatcgtgatcctcacaaagctgacctgggcgatgatgatctgtcgataaaccttgagtcggggatacttgcgttcgagcgcgtcgttggtctttgtcggatcgagcgaaaagtgggcgggcaatgcggccatgtaggcgtcgagcgtgcgatcgatcgtgagcaggtcttgatacgtcttgtcgttgtgggcgtcggtcttgctgaaattgccgttactgtgagcttccggagtgcgtttcaagctgagctcttggaagagcgtcgagatgcgctccaggatgctacgcaaacaggcagactgtggtcagtacggtacgacagtaccacgaggacgatatcaatccggcactcacggggtgagttcgttccgggccaagagatactgccgataatcccaaggccaagccgcgagatccgcttcggtcggcatcaaggtcgagtactgattgacctgcatcggtcggccgagtaccaaggcccattcgcggtctggagtagcagggtcgttaggatgagtcgtcccggtcgcttcatgttgttgattcacagagcggagctgacctacctgcatgcaaaacgtgtgaccagatgacgcgtctttcggccgtgacctctggggcgagaccgaatccggcgccgtcgctaaaggattggccgagcttgtcaacatggcccgaacagctgtttcactcgtagtcaactcgggaacgaaccgatgaaatccttgatccatggcattggcgatccagctactcttcatgtaccactgcatttgtgtgttcctgatgaggtctccataccgcatgagaatggctcgggcccacattgtctattgagaagggtagcgcatgacccgtcagctgctgccgcctccaatgtgatcacgatcagcggcgacactgctcaccctactatcgttcgaaccgggagattgacaaaacgccaacgccttgatggccgcccaaaagatggcgctcgagagggcgtgtccatcggtgcttctgagcgtgggcgagacggacccgagcgcgaggaccgagaggacgagggcgagggcggccatcatgttggaaccctgctcggccaagactttggcgtgggctcggagaaacgtatcgacgtccaaccacagtctccaatccgatggaaagacgtcggtcggaagtgggcatcgcgtccaatcctattcgaggccgaaacatccgcatgtcagccggagagtcggcatcagctcatcgacgcctaaatcgacctacccattctctccaataactctcgatcaacgtctcgcatacatcgcgtggcggcaacacggcgaacaacgccctgacctcgttgtgctgaaagtgagtcaggtcgagcagcttgtcgagcgatgacgatacccccgagaggtgattcttggtcgagaggaacgaacggtcgtcgtacgagttgcgagcggacgacgtctggacctgtgccaagggggagtcgtcgtgtgtatcagtacggttggagagcttgacatgagcgagaagagtgccgtaccctggtcaacacgggcgcccgactcagcgcggccaaagcagtagctccattgtagctgtacatggcgaggagatcgagtcagtacggtgtcgaggccgctactcgctggccctgatttccaaacacccagacttgcccattatcgcccaacaattcgaccgtgccatcatcgtgcatcgctccctctgcatctgaactcgcatctccgaccagcatcccttgattcccgactgccagaccgagatccggatcgtccccacctcgatcgacgctatcctctgcatcgcgtgattcctgcgcctgcgcctgcgtgtacccggacccgaacccggacccggaccttttaaaagactcttccttggcgatcgctccggctcgtcctgcgggctgataatcgagtttccgctcatacgtatcatgcccggcgattccttcatcgtcgtcgacatcgtcatccacctgcaggatcctcaggacggcctcttctgccaatttgagccgtttctccgcgtacccctggtctttgagggataaaagtctttccagcctagccaacctcgccgtcgtctctgccaacgcgggatcgacgactcccatcggcctagggttagggtttcccttgttgtcgtctcgagcctgatccggtcgatcgatgatgagcctcgccgtcgaggtcgaggaagccgacctcgcctccactacgcccgacctggacctcgctgcccccgcatccgagtaacccgaatctcgtcgaccgagggctatcgagggtgctctcgtctcgaggtccatctccggtttgatcttcatgcgcgagcccggcttgatacccgggggggagacgggggatggtaacggtaacggtaacgttcccgggggcgggaccgacatgctcccacccggtgtgggtatcaagtaccccgtagcgatccccatcccctgtgttccgggttgttgttggtattgttggtgttgctgtgggacgaccgaggcggacgtttgtatgcccggtgggggtacgcaacgttcggggagtcttcgttggatgcaattgctgcatgggaatctccggctgtccgaacgagtgagcgagcgttttcgtcgggaagggatggccggaaacaggtccagtcgggtcgggtcggtggatggtggtcggggtgacaaagatcaaagatgaacaggaggaggggaaagacacgagcagatgattcctctggatgagcccctgacgacgtccgatcgaccctgtttgccttgttccgctcactcactcgcatttctgtttacgcctgtttggaatcgcaagggggagacggggatggtcctgttatcagcctgtagcccggttacgaggccaatcttggctggtagcccgaattctcgactcgcctgaagcattccacacaactatactgttccctcggtttcttccctctcgcgctcgtcccatctgtcgagacggtcacattgccattgccattgccattgccgttgccattcgcattcccagcatcgctcgtcgggttgttgacctctacagacccactccccgtcctcctacgtttattatcgggtggatcatcttggcgttgtctcctttccccctcgctggtgtcacgacgatggtcggtagcggtaggtcggggaatgtccatcttgctcctcgtcgccccgggggttggtgagtgttggtgtttgacgaatggttttgcgggtcggttctgttttggtgattaatcgtagactagatcgtgctcgttccagagatgagtatatatatccagcatgtatgaaaggagagcaggtagtcatggtagtcatggtagtcacctttgcatgctttgctttgaacctcggcttgcttcggtcgatcgggctttcggtcaaatgcgagtaagggtgagttgggtatggacatatggacatactgtaccaccctgcagtcatcacatggtacacacagcctatgttacagcaagtaggatcacactgtagtcatcccatcttagccttgttgtcagctgaccgaggtcgagtgtcccgtcgtcgtcgatgatgatccgtcgatcaagtcgcccatcatacgtttgcaagtcggggcaaagagacctttcttgacaaattcgtcacccccgactcgacttttgaaaaaggtcgaaaaggtcgagcatccagcttatgagtacgtcagtactagaagctagtcatgagacgggacagagttgctgggatgatcaaagtggggtacgagctgatcgacctggtcctctggcgctgatgacttgtcgtcggggttacctcgcatctcgctctgcacagttcatgtgctaaccgctacctacatgcatctcctcgctaaagcataccaccatcctagtcagctactaaatgctgtcctgccatcccgactcgagttgaagattcattgtgtaccagttgccagttgccagttgtttaaatctgaatggttgtgtgtgattcgacccaagtttcacgagacatgacctcggtttcgtcatttccatacggatcaagaggtcaaacaaccccataaccacacacacacacacacacacacacaagcttggtcagatgcactgggttagtatacatcctcgtcatcgttggttttcttcctctggcataacctggtaaacctgagcaactccggtcgacaggacggttgtccgtcgtctttgttgaactcccaaagacatatccatctcgctcggacgatctcgctcgacatccaggtcgagagtcgcatccggggatcgtctcgatcacatccaatcatcacgacgttcccatcaacaccacctggccgctcaaacccttggtgaccatccgggttcgctggacaagatggtctcggccatgcagctctgcgcaggcaagttcaagctcgagctcgagctcgccctcgtcgtccgtccacacaaagctgatcatcctttcgtctgaaccgacgacctggatacagtctcgcccaagaacccatcccccttatcctcctacccacccttccgaccgagatcatgctcacctccgctgacgatcagctcgagtacgaccaacgaccccaggatcgaagaggaaccgagggggacgacgaccccgttgcccatctatcgaccgctagatccgaccccctcatcctcccgttcgacctcgacctcgcccgctgatcgaaaaagacacccaaactccatcccctcgccttcatcctccgctcaactcgatggaccactcgcactttcgtccaacccccactcgccttgctctcaacgacgactgggaacctctcactccctcgccggatcatacaccctctccctcttgtcctcccgcatgtcccacgcccacacccctcactcgctcccctcgacgttcacgcttcagatcggcgctacagggttccccaaaccacacgcctcccacgcaaagtcggtcccgggttcatcgagcgctggagccaagctagacccaaagttgaggtgtccggcacatgtgaagatcccgttcgaggcgaggtggtacgatctcgaaggcggtccgggaggcgctgcggtcggtacgccctgggtcgggtgcgtcgacgtcgaggggtattaccaacgacaatcggggccggacgagcaggatggcgtcgttggggatggtgtgacggctgggacgagggggaggaggcattcgacattgggcggtccctctatcgacgtgctccccgacgcttcccgcttgaaacgcgaccgtcgacgttccccctccctctcccggggatcatacaccacgcacacgtccacctcctggaccccacgacccgcccgctcgtcctcgatcaccaggcccaaccctagccctgcccccgctgctacccatcgagattttcccgggtatcagctcgcaccgcaaggtctcctccagctagtcatcaagaacgaagtctcggcgagcaaggtctttctcctcaagtacgacctcgccgcgctcgagatgggtggcaagatgttggtcagggagagggattatatcgccgtcaccccggcgagttcttgtcaagaaccgaacggtgacaatcacgatcatcctaaaggtcgtcgacgggaaatcttgaaaagcgcagtcgagctgcagttcatctgtgttcccttgcaggtggagagaaagatgacgaggagaaaacgacatacagaaccggtgcatcgggggtcagggcggtacgatcaagaacccatgaatcaactcggcgtctccatcgagggggacggatggaggttggacgggggtagcgccttgtccctttgtgacgacgatgtcgaccgaggtcatcatggcgatggtccgacccgacggaccccgcggtacaaggtgaaaaaggcatattttctcagcagacacgtccgggtcgtctttccatcgctctgcggtaatttgaccagccgggaccaagcggaccgacgcgagacggccaaggaggacgtccgtacagaaaggttcatcgaggtcatcaacccgtcgaccgtccaaccggggatgagcccgaaagagatcaaaaagatgagacgggcgagttttgccagcgaaagttgggagggggtcaaggcgttgttgaaccgcaagatgaaggaggacgaagaggacgagcggatggagggtgatgacaacgacatcgagtcgtcgagacgggaaagaaagatgggcccctcgagactcgacgtcggcgaacctgccccggccatgacgttccaacgcagccctacacccgttcaatccggtctcacctcgcttctcacggctagactcgaacgacgagaagccagtaccgatgcgcaggccgacgaggatgaacaggaacccgacttgcgacactggcatcgagagctcggactcgacccggcgcttccctcgcccgtcacctcgcccgtcgacaagaagaggagtctttggcccgaagacgatagcgagaggttgctgagcgaaagtcttcagcgtttaccctggaggaggtgacgaggtgggactagagggggcaggacagtagctacattgtacattgtagcatgatagcatacacgttttacccatacagatggatgtctcgtcgacttgcgccatttcgcgtggaaatcattattaatctgtcgccagccaataccataagctttctcaacatttgagcatcctcccggctctgactgatttccctctcatcctgacgagattgcgtagtcgttccagcttcgctctttggatctagctacaatggcttttcgatcttgtcatggccccaatatctgagtcgctgggtcatgtccgccaacgacaccccagacttgtggacccggtgtttgaggatacccgtgatgtgatgatctcgtcatcccgggtctttccaccggcgcgtgacgacaagttgtcgatcggggtctatggcagactagctggccacggggggagcaattctccgattaatgcttcccttggaacgctccttcgcctcgacagggtccggtcttttcgaagttccaggtcagaagatcgcgcttgcgagcagctgctgcccgagtcgcacgacagtgctggaagtctggtgtcgattcgtaggttgatccccttcgcggatacttgatcactcctcactcctcgtcgcgccacaagatgatcgacttgtcccgctcgagccctccggtcgcgatcatccttttgaacggatgaacggcgagcgctacgactgtatctacgagcatcatcgagaacttcggatcagcctggccctgaaaattcgacctctgcactgtactcacccgcatgcccttcgagccgctgcaacagctctttgctctgtccgtcccaaatacacacttcgctcgtatcgcttcctgatacgatccaagcctgaggtacccgatccgcatcctcctcattggatttcccacttctgcccacgttgggatcgattaccaacgctgggctgctatacttgacgttcgtatgccccgtgtacgtcttgatgcatcgtgacgtgtgataattccacacacggatgcatgatgataaggaggacgagatgaggttgtcgccattgggagtgaacgccgcgtatgagctggtgagagagagatggggcaaagaccatcctcagctaccaagaggcgtagtacagaatcgggatagtgcggctcaccatggtgaattctcctcgttctcgatcgtcttcaagcactgtcccgtcgagccgtcccatatccgccttttgttcatatcggatcttcaaaactcagagctctgacacatctcggctcgtaagactcacatcaacccgtcataactgcctgtaacgatcatcgtcccatccggattgtacgccagcgctgtcacggggtcgctgtgcgcctgtaaggtcctcatcttttctcctaggcggacgttccagaagatgacgctctcgtcccatccgccggtgacgagcacgttgcctcttgggttgaacgtaacgcaaaggacgtgggatgtatggccatcaagacggcgtagaatggtgccctggtcgaaacgcaagtatgagctacattacgacgacgtgacgagtgggcgtctctggactcacctgcttgatcgaccatatcaggaccagcccctcgtcagctgccgtagcaaggtaaaggcagtctggcgagaaagccaggtcgttgattcctgccgatgtgggtgtttagcttgaaactctatggtctatcgtgctgaacaaattggtccgtgccgaaggctcacctctgtcatgtcctctgtacgacctcaagtgctcgcccgaactcgcgtccctgaatagacataccggatgagttggacatgagggattccgttcgagatgatcgttgaacttgccataagtgagctacgccatccgctcctaaacccgtatgaagcagaccggtaatcagctctctgacagggcttcgagggatggcagagcgacgcacctgcactcgccaggtaccgcccgcaaggagaatacttgaggcacgttacgcctttgacatgggagatcaacgtcctatactttcgatatcgtggtgttcgtcgtcgcgtcgtgtcggttaccgttggcgagctcgatgacccggccacagcgttctgctgagcctgcatctctgtcatactgatcgtcatgctagtttctgcacttgaacgaagactgcgtgtacgtgttgagatcgaggtcaagataggacatgtcgagtgttgttcaagctcattgcatgtgtgagacggcaactcgacctggctcgctcgattgttcggcttatttccaccgtcgaacgacgtttcagaccgtcaacgtcgtagggtcaattggacatctatcgatcggtagagcgatacctatgttgtcaccgtgaacttgaagcaggcggaccgctctgtgcgacttccgttgatttctccgtgaagagtttcaggagatgtgggcatgtatgtccctcacatccaggcacgcatctagggaacagaatcgaacgatactataactcatctacatataatacagattcggcactccttcgttcttcccatgacagtcaactccttccgaagttgcgaaggcgatcgaacaatccgcctcccccttgagctccggccataggatggccttggccgtcatctgcaaccgatggcgcatgttcaagactatggtggtgggggtggtgatgatgatgccgatgtcgatgatgatgatgaccgccatggctatgctcggatgttcctgaatgacgatggttcctggggcacagtatgatgaggttgagcgtagtactgcatcggatctccatgcggtggtccgtagtattctcctagcgcgttcccagctacaggagcgtacatatgcgccagaggagggccgtcgctcggtctaggataagggtatggctggacttgcgagtaatccagttgctgctctccgtagctctcgattggaccatgatccgatcgctgatattgttgccgccactgagactcttccctggcccgtctccatcctccccagaatccagaccctctgtgcgacccgctaccaccgatgtcttgctgctgcccgtacatgcccatcataggatccattcccatggccatctcccgctcgtattgcctaccaccgggtatgaacggtttcgcgtacaacacgtccgcatgcctcggttcgctaaacacgggctgagcgtacgtgatgaaaggaggtggttccatccctgggtattgctgcatcatttgcgctttggcgaccttgtgctgttttcgtatgacccgagagtaataccctgccatcgagtctcgtgatcgagagaaaagaatgcctagtgcgatcaacatgacagccaggaggccaatgatgactgtgaccatgagcgatgcgccatggtcagccgggttactgctcgtcttagacagaaggactcactaccagcaatagcgcctcccgaaagcctattcccgatcggcttcacaacgcttccacctataactggcttggctgctatggctacgtactgagttggcggcgaggtcagagcgaggtaaaacgatgcggtctctgtattcaaggtacccactcgcactttggcactatagtaatacgctctgcaaggaccccatcgaagagtgaggcttgagcacctgcctgcgggcttgatcaaagtgactcacgtatagacgttggacaggaatggagttcccagcagtacctccccctgagtatccatggcgctgcccccaggccaggcgacgatacctccccaacaagtccggacgcttcggtgctgcaccaaatcggtgctattggtctcgtaccgtccgccaggaaggtgtactgagaacgatactgaggcatcgcatggtatgttctgtcaaacggattttcctttcagcggaaatcatactggacatcgcccgctgcgtcaactcacccatcgactagtcgtgaccctatcccgaacagccccgtcgatccgagcgtaaattgcggttgcagtggcttccggtacgattatggtatattgtgcagggtctatcgtagcctaagcacgatgaaatggcaggtcaggagacatttcccctcagtatatcttatgtcatgtgaagactcaccctgaaaccggacgtgccaacatcccgcccgtttatctcgagtttgttcaattttgtcgcccagacactcaacaagccacctgtagggcggatccagttcctttgatgagaaacggaattagatcagcccggataatgagtttgtagccatgtcgggcgcaccatcctcctcggtagctgccctccggaacggcaccccagtgtactacaccagccggttgagtgatatccaaagagtatggtcccatgtcgatcccgacgatcagcccgtcctgtggagggtcgattaagtccagtgcttgagggatgaccgagttcttgggcgtggtctagcatgagggcatttggatttgttagaccatggataagatccgttttgagcgcgcactacgaaccagatcgatccctaacccataaatcccttcagtgtccggattgaacccggatctgatcccgtagtcgtttaccgcgctctgcgtttcgtccacgaaactatctaccagaacgacagtcttgccttccttgtcgccccgaccgtcattcaaggtatcccggcctagccgtccagaaacgtttagtagggaagagccggaaaccagcgtggtcgaggcgtaggtatattccagtccgagctgggaaatcgacaaggttggactggtgtcggggtcgaaactgggtccaaaaggaacgtcagctgggcagatccttcgggatgcatcgcagagacttacgctacactaccgcttatacagccggcacagtcgaccgaagcaaccagaaggtaattgaccgaggtcgctgcgtcacatgacgggtcacttcagtaagccaaattggtcacgcggtgtgaatcctactcacacaaagtcaggttcatgggctgagtctcgtatcctggcccttgacctcctagtcctatatcgaccacgttcgttcctccaagagtcctcaagaccggtatcgccgtgtaactgctgcctagtcgcgagtctcgagctcgtcgaccgagtgagcgatccaaaggagcctttgcgacgcagtgtgcgcttatcagcagaagcccggtagctgacagggctgtgctatgtttcatctcgtcctggttgttccggattctccgtcgatggactcccttgctttacccgatcggaaactcggtggcggggaatccggctgccttcgattctgtcgccgtgtggtctcggacgatcccacggtgcccaaatttatgatgcgcacgtcccttccgtttactattatatgggtgtgagtccagacggatacatcggcatgccgatctgaaaatgaggcacgaaatctgagcctctactgatgctcacgagcaggatgtttcttctgacgattgggcaaggatattcagatgacctttaatgaccctctcgaccggcagacgggtatgatgacggcgattgttttgtttttcttgccagtcgtgatggtcaaagaacgttctactcgctcctttgatgaaaaggaagggtcctttgatcaggtcaattgcatcctttgatcgcttgaaattaggtttgtgatggatcgaacgcgtttcagacgtgatattgcacgccgttctaaccatacactcaactttctgtgattgtatcgcacgcatgaccctaaccccataacaacaaactggcatgacgaataggccatgcagataactagggtcaaacctgtatgctagatatcaagacacgcatacagagccgaggatcgggcaggtatgaaaaagaaaaaaatacagaaaaaactcgcaaaaagattgaatccaatggcctctccgagaatcgaactcggagtgagagattatgagactctagtgttgccattacaccaagaggcctgcgagtgtttttcttgaccattacaaaaatatatcaagacatataatgtctatcagtagaaagaaaaacgacgccgcaaaccctgaatcatggtatgggaatgcaatcacggattacaaagtatataccaaaattttttctccagctttataggaaacgggatgatgtctgaaaacttgaaatacgacattgtaacgtacaatcccccgcgtaactaggcgcacccactccacgaccattgacgacatctgattcactgacggcgacgacgtgaccgacccctttagcaccgatgatcaaggagctattcgggtacctcgccctggggtcgggagaaaccgctgacctcgatttagccacacactttcagatcgggccttgacgggtatatcgacgaaatgtcgccgccgcgccagccttggccatctgctgacgttgaccggtgtgtgtggttgatcgaccaattagagctcggtgaaatcagctgtaatggttggttatgtccgcggctctgcgccgatcgcggtgaaatcgaggtgcgacgctagcgacagcgacggtgttgacagacagagcgagtgagcgtcgcaaaggggaaagaacgcgcctcattggtcgcgtctatggcatgcgcggggtaaggtcaagcgcggtgcctttcgccgatgcactcgatcgagatgatgccccagtccgtgacccgggcgggaggcaaaagccaggggtaaagcgtagaacccgtgtcatgaacaccgagtacggcggaaatgacaccaggcggtagtcgccgcagaccgccttgagcgtagacaaggcgttcagcagcgagaaagggcaaggcggaaaggccacagtggaagcagacacgactgtcatccgcgcatcaaccgcgatcccatcctcatttgagagactgtctcccgctctcgctcggccacttcacctttgaccccgttgttcctcgacgaacgacagttgaccgagatcgcggtcgcgttgtgtgcccggtggttgcggaccgtttgcccccctcgtcgctcaccggtcgtcaggcgatcaacctcgacctggtgccacgcgaaatgccaagagaatgccaagactttttcattgacatctggagaagttggtggggaaccacattcgaacgtttaggtcgtctcgagctataagatgtggacgttcccccgcaatctagacgatatgtaaccatcaatgacctcgtttctccacacacacaagcaactcttggctctaccactagcctctagtctccgcttacctccctacgatcaacctttttccgcgcttgcgaccgacaccgaacaccactaccaagatgcagcgacaagagtctaactacagcgaggacgtcaagggctaccagccccagaaccccaagcgcaaggcgacatggaacacttccaccgccgccgatgctcacgcagaggtcatggccgagtacttggctgagactgtgagtttcatcaagctcgatgtcgacacgcgctcgattggacccgcctgacctttacccctatcaccgttctaggtgcccgagcccaaggccatccacaacttcaggacctacctcatcgccgtcatcatgtgcatgggagctgccgcttacggatgtgagtcatggctacgtcccccaagttctctactttttgctcacctccatcccgcctctccagacgacactggtttcttcggaggtacactcgcgcttccctctttcaggaaagagttcggtctccgagttcctcaggacctgaccaaggctcagcttgctaccaagagggccgacatggtttccctcttccaggctggttccttctttggtgctggtctccaactcccctttaccgaaaagttcggccgcaagtggtcggtcatcttctccaacatcatcttcatcgctagtgctttcgcccagacctttgccaacggatcggtcgtgagttgcaaccggagacgactactatgtagcgaccagaagctcatccatcctgatcactgcagcccgtcttcgttttcggtcgattccttggaggtttcgctgtcggtttcttgtccttggtcatccctgtctacctcgccgagttctctcccccctccattcgaggtcgtctggtcggattcttcgacatcttcattcaagtcggtaccctctgtggattctggatcaactacgccatcgagaccaccatggagtccaacaggttccaatggcaactccccgtctttgtccagttcttccccgccgccttcttgctcgtcggtgccttctttgtccccgagtcgcctcgatggttgttgatggtcggcaagcgagagctcgccgtcaagaacctcgtccgaatccgtggtatccccgaggaccacccttacctcgagtttgagctcaaccaagtcacccagggagtcgaggccgagcgagccctccgaggcgactcgggtatgctcaggatcgccaaggagctcttcgtcgtccacacccaccgaaagaggttgctcttcggaatggctttgatcttcttcaagaccttctctggtgtccaggccgtcaactactacagtcccatcatcttcgagcagctcggattcgtcggcgccaagaactcgctctttgccaccggtatctacggtaccgtcaagtttgtctgcaccttgatctttggattcttcgttgtcgaccgagttggtcgacgtatcccgttgatcgccggttccatcggtctctccttgtgcctgttcttcctcggtggatacgtgagttacgggccccactcagtatttaccggtatcgagcgctgacgacttggccttttcatagttgaccgctgtcggccccaaggcagctggcactcctcgagttgccggtgactacgttgccatcacttcgcttttcctttacgctgcctggtactgcttcggttggaactcggtccccttgaccttgatctccgagatcttcggtgctcgatacaggatcgtgtccatgaccgtctgtttgatgtggcaggtaagccagccccagcaaatttgagctcatcgaatcccaagctaacgcctcgactctatcgctcagtggctctgcactttctcgatcgtccgaatcatgcccatcgctttgaactcggtcaccaccaagacctacttcatcttcggagccatcttcctctgcgccgctcctttcgtctggtactttatccccgagaccaagggattgtcgctcgaggtaagccaatagaaaagcacccgcgttcacagaccagagactaaccaggaatcattatccttgcagtacatcgaccgattgttcgacagctccaagcgaaccggtgccggtcacgccgatgtccccaccttgaactcttccggtatggacgaggacaagcctgtcatccagtacctggagaacgccgccgagcagaagttggctcccgtcagggagtagaaccggtcgacatggtccaacgacactcgagccccaactctcgctctcttttctctttcttctttcttgggtcgacctcgagcgtcaaagtctctcattttcaacagctaggatcaccaaacgggctgtaggtgtatatgaatctcataggttttattgtactagggcgtacaaaggggaagggtgtacaggctgtactcgccgtcgagtgtgatctcgctttcaagataggttcaaacaaagtagctagccctttagtctaagccgtggcaaataccccaataccccaatgttatcaaatgtttcaaccatggtcttctctgctcgggcaatccgcagtcgttcctatcttgtccccgtgtcatggtcttggcgtttcacctaatcacatgtcgatccaccttcggcgttctcgaatttgcttccggatcggccatcctctacttccggaacttgccgacttttctatgagaaataatgggggtggatctacaccatattagggacctgcctccaaccttgacaagttatttgatacaatatccctatccgcacaaatgtcgctaatacctggggctatgctctgctgtggagtaacgatcggtctgccgggctaaggggtaatttctacgcgcagtagcgatatgatactcaccgacgggccgaaggagataagaaatcccgcggggattattacaccgaaacgagtttgtgacactgatctgctgtagctggtctctcctgcacatccaaaaacgatacagatacaaatactcgggtgaccctgaccatgagactaagatatgcccacacggataaccaagcctttgaaagcaagaatctacgcaaccaaattagcccattcccaggtcaatactcgagcgatacgatgtcatttcttacatcggattcgattttgcgccgcgatgaatatcacaagcccgccatgtaggaaggccagtctcaaagtcgtacgaatgacaagagaggctgacttttccacttcttatcgttgcagtgcactgtacaatcccaaagccgctctgagcgcgactggcatgatcgtgtatgccatattggcgatcgcgttgtggtaccgtgagcccgacgtatcggttttgtttcacgtcagaacccatgaccaacggtacaatacgataggttacttcaagatgtcacgtccgagatccaagtggatgcgatggttacctgtcggtacgacgatgatgtcggtcggtctcggaatccgaatcgcgaggcgcaacggtacgggagcgtggtcctttcttggggaaacgatcgtgagtaacagcaagatctgaacttgttactggagctaacagtatgagttctgatatatcgtcacagctgttactgtctgcgccctgcgccatcatcgcccagaactacaagctcctatcccaactatcgctacacctcgaggctgacgactgtctcatcattcgacgttctttcttgatgcctctgttcctgaccagtgacacaatcacctttctgtctcaactgggaggtacggcaatgcaagcgacgaccatgccggacattatggaatatggtacctatgtcaccctcggtggactcatcatccaggccatcacgctggcgacattcatcttgagctggttcctcttcaggcgacgggtgtaagtgaaaggggcttgctgttgacttggccgggcgactgacgatccgcatcgtatcaggcaaacccgacctcagcatgattccaaatgggattcggcttcgccatacaagctagggtatgcgcgaaggacggatttccgctgggtatggtggtgcatcggattgagctgtctctgctgcctggtgagttgttctctcaagagatttccccttctagaggccacactgattctcccaccgattttgccagatccgtgccatctaccgagtcgcggagtatgcctcagggtaggtcaagcctgatgactggagtgacgttgaatttccccaagactcatcatgcattcgctacggctatagctttgattcgtatcttgcaaatcacgaggccttcttttacgtctttgattcgatcccgctcgctctgagcgttgccgtgttcgtctacttttggccgcctcacgcgttgggcggatctgataggtccatcttcagccttccgagcgtagtttcgtcggaaggcaaggagacgcttgcggggacgaggcgagcgacatcggccgggactctaggcgcttatcgtggtagccgaggcggcagagacaatcgacctttccaaccgatatagccgcggtgtatagcgcgatcagttgtaccaagatgtcccccatccaccatagccccatctttccccgctattgctgtggaatgccgtgtttcactagtattcactcgtttgcgaaagccgccatgatatccccttctccaaaagcagcattgatcgagaagaagctcaaccagtctggctccacctggaaaggcatgccttcaaaatccatcggcaggtccagttgcacgctcgacccgggaggaagcgatcttgaagtaccatcggcctcaaagtgtttcagagcgttcctccaattcagcgagccactgtcaggctgtcgcagccgatcgaagaggtgggggtagaatgaatatacctcgcgtaagagaccctccgcaatagccaattcgaccgacatgtcgttgttcccgcctgacggctcgttcagctggacctggtagacagtgcagtacgcaaacaaggagaaaacggataggtatgccggcatcgatgctagatctggccggttgcgagccagatgttggatgatgttcctgcacgccgagtgaatatagcctccatatcgcctgacatgagggaacacaatgtcggggtggacaggcggacatatgaatggcccgacgtcggcattgatcttcgatgccatggcggcttccacgatgtaggacaacagacagagatggggttgcgacggtactggcggtccaagccgggtcgatcagtttagggacaccaaggttcaaggagagcctcgacaatcaactcacgacctggacccatcaggtctcttctccaaacgtcgcattcggccttgaaatggacaaatctatcgtgaaactcttgcatggcggccggatcccacgtctcaccggtcctgacgacttgagcttgcctgacaactggaaagacgaggtcaagcagcctcgactcgaatttgaggtggaaataccaggcattgatgtggtacctctcgctcaatgcagtagatatgttgctgagcgagatgtagtctagcatcgagccggagcctccgaggagattgatcctgcgacaggagcattggccccggtgacttgtatcagcggacgcgacgctcttcaccccacggtccaactcaccaagtctgccggtgtagacagctgaaccactgcggcgatgaagatcggttcaggatgatggcgttcggtactgtctatcgtttaagatcgcacttgccagacatagcctgttcaagccagtggtggtgtcccattgatctagtcccttcccgtccctctcgtgcagtaccgttcgcattgaatcgtccaagcccagctttttggctgcctccagggcgagagctcccgcgttgtgcggctccagtagtccgatcgccttgtcattcgctcgtggtggggcgagagacatgatcaggagacactcgacggcagcgacctcgggtcgattgggtgtgataatagagatgttctgctctgacatcctgatcaccatgcggcgagtcgcaggggagaacgactctgttcctgttccggtgcatgcgagaaagtaaagtatcgccgagcggaggagaggatgctttggatattgtcgagcttgacgagtcagtcgagttaggggtaatgcgatttggaacaggtcgacgaaactgggtagcaaggtcgtcaacatgcaaacatttcccggcaagtatcaatatgggcttgcctgtggtaggcacgttccatctcccgggggataacgattcctagttctattggatccaggtatgtatacatactagccagtccgaatgtcatgacggagaaaccgatcgggccttcctgctgcgtcttgccgtaaatcgcagactcctccgtctgaccagtggtcctcacggaggcttgacgagtcggcatcgacatcgttgagggaaaggcttgcgaaggtggatcctggactggaagtattttcttaagcatatcctgtatgtctctcgtccgctgcttgatctcttgcaggtcgtcctcttccgccgcagatctcgtccgtttgagctgcacgttagcggacggagagccgttggcttgtaagtatgtactgggctcccgcgacaaagagattcgcccatgattatagtctggagcgataccatggatccctggttgctctccgtccgctagtctgtaacttgtggaagcctttgctgaagcctgaagcgagcaaggtgtccccaagaccgtacaccggtgacatccctttccagtgaccaattcgcagcgagactttcgcgtctgacacgcctcgcaagccatggacgtcttggtacgtttattcctccgagtcgatgtgtctccctatggtatagactatgagtgggatgttccgggtgagatctcctcctggtcgcgaatcgactgaccgaagcggcttcacggtcctgcagctcatctggttcggcaggagcataaccagccatgccaccggaactcattctgaacgagaaatcctcaaactgtcacactgtcagtctttaaggcttggagatcagatccgtaattctgcaacgtacagctaaaagttgagaacctggaccacgatagtttgatgtcgaaagcagacgacccacttcgaatatggtcgagtttgcttccgacaactgccgaacctcgatcgattttccgggagtaaccgtcctagaataccctcgagtgcaagattctgtctgctcaaaacgtttgaagcgtggcgagagtcagctagcaatggttgtcttcagactagttggaaaagtgatcgtgcgccgggggggacggtaacgcacaggcacgtccctctgtaagcccaagccaagtcaagccgtactactcgttccgacggatgacccgtcggcgcggacacggaatgctgctctccgacgacccgcgccgagagcccgccgtgcatctcgacccaaccatttcgaccgacgtgtcgaaagtgttaggtcgcaacaaactgtgaaattctgggcgagtcagcaatagggccaatgacgagacgatgcattggcaccaggccgatgaaagcgatcaagaaagggaaggtgaggtgagacgcttgttgtccggcctcgaccgaccctggaagaacatttcatagtgtccagcgtatcggttacactgcatggatccagctagctcgagcagaaaagtcagttgcgcctcgacgaccttttgtctttccgtctcatagtggattacgacggaacccgattttatccgtcggcgatggtggcgaaacacgctgtccacgaactgaaacaaacgggcccatagatcgtgtcatccaaagctcaaggaataagcagcagtacgccggagaaacaggaatggtacgcacttcgatttgtcttttcgaaccgttcaggagaaacacccgaggaggacaggccgagcgggtttcgtattgtataatcaaatcgcattgaaaacatattcggatacaactgtaaagaatcaccgcatccagtcgtgtcgcccatcactcccaccaccgagatatcttctcctgcctcgacagcagccgtttgaggacgaatccagatctcccacagccttagtccctcctatcgtgccggatcgaggtaccggggcttcatgtcactcgttcactttcacttgggtcgagcgggctcgacgccaaaggaagctcctgcagcggggttggaaggtttgaggcatcgatccctgcagacggtacagttctccggttgtctacgatatcaacgtcatcgtcatcaagcaattcggatcgggtcagcgatcggaccgagcacctagaaggggtcgacggagactcaccctgcgcatcccttcaagcatcccttgccctctgaacaagcctggcagtcggacggggccgaggtgcatcccgcaatctcgtccttggcacacgagtctcgttcgtgggtggggttgcagaaagtgcacttttcggggttaccggtgcattgaggggtagagtcctagttcatattgaagtggatggaggcgagtcagtatggtgaggtttgcgccgggtagggggtgatgatcggggtgatcaactcacagccattgtgatgtgtgcgtgtctgtgtgtctgtgagttgtaaaaagagtcgatgaagtgtctgtacagtcaagcgaatgttcaggtatgaacgttgctgtacatgacgatcccgttctttataggcagttgtgcatcgctcaatacgtgctcagacggagttgcgatgccggtctcgaccgatggcgatgatcgaatgatgacgaaatgactcatttgattccgagaccggaagtagttcgagccaatcaaagcgtgtctattggaaactcgatcccagctgtctagtagattagcgtttccaaagggaagcgcgtcgaggtcgccttaaatcaaaactccaactttaaggagggacccgtttgcgcttggattcaacaatctcggatccgagctcatcatatcggggaggggtcgtcatcatcgacctggtcgatcaaaggcgaaaatgatcagatcatcgtttatcgactttcaacgctcttctcgccatcgactcgcattacagcgactctgcaagtaatatctacgaccaccatgtcgtatccgagcttgttccgtaagtctctgctggccggcaaagtaccctcggcgaccacgatctgacgcctcgttgtcgacgatactgtgtaggctccgaggagttgagcaagattcaactcttcattccacgagagtgtgcccatgataccatctacgaacttggagagactggcaatgtccatctcctcgatgtgagtcttggtgtttgggcgggcacgtcgcccagtaccttgggggtacacgttcgacacgaccgactgatcacgaaatgctctttccacccgacgacgaccaccagctcaacggcgaggtcaacgcctttcaacgatcctttgtcggcgagatccgtcgtctcgacgagatggaacgacgctgccgacttttcaacacgcagatcaccgagacctcgcctccgatcgggatgacgcctctttctgccatcccgtcgttcacatcggtcggccctcgagctgctcaagcgtttgacgagctggacgacaagttgaccgagcacgagacccggttgaaccagatcaacagctcgttcgaggtgctcggacgtcgacagcgggagctcgaggaagctcgttgcgtcttgagggagacggccgggttctttgatcaggctgggagcaggcaggtcgagatcaggtcgtcgtttgatgacaatggcgatggatccgcacccttgttggagaatgccgccgagtatggtactctgcccggcgagagcgggttcaacggggtcgacctcgagtgagtcgcggccggcgtagcacgatccgttcacgatcgcaacgctgatcccctttttgccctccgacaacctggtagattcgtcgccggtacgatcgaacgctcgcgtatgcccatctttgaacgcgttctctggcgagtccttcgtggcaacctgtacatgaactattccgagatcgaggaaccgttcgtcgaccctaccaacggcaaggagacgcacaaggacgtctttatcatcttcgcgcacggatccgagctcctcgccaagatccgcaaggtggccgagagcatggggggtacgctctacccgatcgattcggacgccgacaagcgcaacgacgccatgcgagaggtcacgtcgaggctagaggacatcaactcggtgctcttccaaaccggtcagacgcgtcgggtcgagttgggcaagattgccgaacagctcaactcgtggaaggacgccgtggccaaggaaaagacgatctaccagacgatgaacctgctcaactatgatgccaagaaaaagacgctcgtcgccgagggatggtgtccgacccgggacattactgccattcagcaggccctgcgtcgtgcgaccgagacagcggggacggcggtgcccccaatcttgtccgagttgcagacccatcagactccacccacgttccaccgcacgacccctttcaccgagggctttcagacgatcatcgactcgtacggtatcgccacgtaccaagaggtcaatccgggaatgtttgccgtcatcacgtttccgttcttgtttgccgtcatgtttggtgacatcgggcacggtttcctcgccacattggccggtgtcgtcatggtcatgtacgaacgcaaactcgccaaggctgggctcggagaggtgagtcgtgcgcgcagtcgtcggcgacgaatgacgagtgggtggctgaccccctttgtgcgtgccggtggtgatcgctgcagatcttcgagacctttttctttggacgctacatcatcctcttgatgggcatcttttccatgtacactgggttgatgtacaacgacattttctccaaatcgctgcacatctggacgtcgggctgggactggcccgagggcaagaacgggaccgtcgaggccgtcgccacggggggtacctacctgttcggtctggacccggcttggcatggagcggacaattcgttggtgtttagcaactcgtacaagatgaaaatgtccatcatcctcggtgtcatccatgtgagttggcgcggcgggtcgagacgtgtgacgagggttgaaccgacattgacgtttttttttttggcagatgacgttcgccatctgtcttcaagtgccaaaccatttgaagttcaaaaagcctctcaacatttacgccgaattcatcccccagatcttgttcatgcaatcgatctttggctacctggtcgtctgcatcgtctacaagtggtccatcgattggtctcaatcgagcacggctcctcctggtctgctgaacatgctcatctacatgttcctctcgcccgggacggtggacccttcgacgcagttgtttgccggacaggcgtttgtgcaagtctgcttgttgctcttggcgctggtgtgtgtcccctggatgttgtgcttgaaaccgtacgtgctctggagggaacatcagaagatcaaggggcaagggtatcaggggatcggagggggtagtaatggcggggacgagccgaggttgtctacttcgcaagagatgcaggacgaggaggatgggaacgggcatgccgtggccgaggccgaggaggacgagcacgtgagtcccaagggcgacctcgacgtcgacgtctgatcgaagctgatcgatgcccccggtgtccctgacgctctagccctttgagatgggcgacgtcattatccaccaagtgatccacacgatcgagttttgcctcgggtgcatctcgaacactgcatcctacctgcgactctgggctctctctctcgcgcacgcccagctatccgaggtgttgtacaacatgacgctggaacgcgcgtttgggagtacgggcgtgttcggggtcgtcttcaccgtcgtcatgttcgccatgtggttcgtgctcacgttggccatcttgtgcgtgatggaggggttgtcggcgtttttacacgctttgaggttgcattggtgcgtactcggggtcatggtcgtcgttgatggacgacgtgtgggcgagggaacggggcggttcgagtatgctgacggattgcgcatcttttttattgttcatttatcgacattgcttgggcatattctgtctactctctacatgacgacgacgacgacgacgacgacgacgacgacctggcgggctttgcgactatcctacagggtggaagcgaacggcaagcattacatggctgggggttacgcgtttactccgttgagctttgctgcgctcgaggtcgagggtgccgaggagtgagagtgagagagagtgtgtgtcaggggggcgtgtcatatagagacgaggggagaggtgtatgtagaggttgtggatgatggattcgaggtggactatgtgacttgaatgagcatgttacattacctactctttttgtgcttcaaaggttgtttcatgcccgaatgtgagacattgatagaggtgtacgatccatccctgtctgtatcacgtgaaactcgtttgacgacgatgtttgtgtttgtgattgattcccgcgcgtcgcctcctctcctctgcccccctttgaatcatttttttcccccaatcacggctgcgcgaccttgcctctctccctccttcccacgccgccgtcgccgtcgccgttgcccgctctcctcctcctgatgccctctgctctgtttttcactttctctcccttctcactcgcctctcggatcatatcccatccacccacccacaccatccacctcgaaccatttccctttttttcctcacctccaccacctaacaccatctcatcctcacacacccgtcacactctccctctctctcctaagcgtggcaacacccttgagactctttatataaacttgacgacctcttatcagggtaagcttcatcgccaccgtcatcatcatcatcatcacgatcacaaaagacgttgacgacccccatcccccccttccccccatcatagacatagactagaaaaaagaccaccccagtcttctttcaatctaccccctacccaaaaaaaaaggatctcttttcctctctcgattgtatcgatcgacacatagacgcggcacacgcccccgacctagacctacctacacgtatttcccaaccaccccttccctttttaaacccatatagtgagtctttcgccacctattacccaactctttatccgagcgtgttgctaaccacaccacactcccttttgccaccccttcggtgccaccccagtatatatgcccgccatggccccttccacttctacctcgaccaagtcgtcgttcgacgtctcgacccttttcgtcgccgacaaggacgcccgtaagcaggccgccgaatcgttggccagtactagcaagaaccagggtgtcactttctttggtgacatcggtttgcccgatgccctcgtcaaggtcagttccgagtctctttggtggcagagcgtcgcggggacgaccggctgaccggacgatttctccccccttgactcgactgcaccaggccctcggtgacaagaagaagcccgaggctcgtgagggtgctgccgaggtcgtctcgaccttgtgcgagaacggtgccgctcagaagctcgagtgtttcatcgtgacctccgaggccggtaccgtgttccccgcgttgctcgaggctttcgccgacaagacccctagcgtcgccgctgccgcgctcgctgccgtcaagtcgttcgtccagtccatgaacccctgggcgactcccgtcctcttgcccgcgctcttgcaccagatccagaccgctggaaagtggcagatcaagacgggttccttggccatcatcgaccagctcgtcgtcgccgctcccgtccagaccggaaaggccatgcccatgatggtccccgtcctcgccgacgccgtctgggacaccaagtctgacgtgaaaaaggccgccaagtcgaccttgaccaaggccaccgcgttggtcgccaacaaggatatcgaaaagttcatccccgccttgatcaaggcgctcgtgaaccctatcgaggaggtccccaagacgatcgcattgttgtccgccaccactttcgtctccgaggtcgacgctccttcgctctcgttgatggcccccttgctctcccgaggtctcgacgagcgtgccaccgccatcaagcgaaaggtcgccgtcattgccgacaacatgaccaaattggtcgacaacgagtacaccgtccgaccctttgttcccaagctcttgcccggtctcttgaagacggccgaggtcatggccgaccccgaggcccgtggcgtcgtcaaccgtgccatcaagaccttgcgagaggtctccaaggtctacgagggtgacggtaccaacgtccctcccctcaagatcgccgagggtaaccacctcgtcaccaactttatcgccgagttcaaaaaggccgacgccaaggagatcccggacaacgagaaccccgcgctcgtctacgccggtgtcctcgccgccggactcgtcaacgctcacaactacgaccagaacacctgggagtcgaccctgtgcccctacttgaccatggctgcgccctcgagcgacaacggtcccgtcgtccgtgaactcttgcaaaagaaggccgacgaggagggtcaggacgaccgagtgttcgacgacgaggaagagggcgaggatttgtgcaactgtaccttttccctcgcttacggtgccaagatcttgttgaacatggccaccctccgactcaagcgtggacaccgatacggtctctgtggacgaaacggatccggtaaatccaccttgatgaacgccattgtcaacaaccaggtcgagggtttccccgacccttcggtcgtccgaaccttttacgttcagcacgatatcgacggtagcgaggccgacatctccgtcgtcgactgggtcctctcggacaagcgtctcctcggaacccccgatgacatccgcaagaccttgagggacgtcgggttcgacgacgagaagcaaaagcaccccatcggttccttgtccggtggatggaagatgaagctcgccttggcccgtgccatcttgttcaaggccgacatcttgttgttggacgagcctaccaaccatttggacgtcatcaacgtcacctggttgatcgactacctcacctcgctcaccaactgtacctcgatcatcgtctcgcacgattccgactttttgaacaggaccgtcaccgacattatccacttgaaccgattcaagatcaagcgttaccccggtaaccttgaggctttcgtcaagatggttcccgaggccaagtcgtactaccagctcgaggccgccgaggactacaagttcaagttgcccgtgccccccctcttggacggagtcaagaccaaggaaaagtcgctcttgaagatgcgaaaggtcaacttctcttaccccggatccaacgtccagcagctgttcgacgtcaccttgatggtctcgctctcgtcccgtgtcgccattctcggacccaacggttccggaaagtcgaccttggtcaagctcttgaccggagagaccgagcccaacggtggactcggatccgccagcgacgctggtgaggtctggaagcaccccaacttggtcatcgggtacgtcgcccagcacgctttccaccacatcgattaccacctcgacaagacccccttggactacatgttgtggcgataccagaccggtgaggatttggaggaactccaaaaggcctcgaggcagttgacccccgaggaggaaaagaagatgaaggagggtggtaccgtcatcgtcgagggtgccaagcgaatcatcgaagagttggtcggacgaaagaagctcaagcagtcgtacgagtacgaaatctcgttcaagggattgtcctcgaccgagaacatttggatgtcccgagacgagttgctcgtccgtggattcgaaaagaaggtcatggagctcgactcgcgagaggctcagcgattgggtatgatgaggcccctcgtccgaaaggagatcgagcagcactttgccgactttggtctcgagtccgagtttgtctcgcacaacaccatgcgaggtctgtccggaggtcaaaaggtcaaggtcgtcctcggtgccgccacctggcgaaagccccacgtcatctgtttggatgagcctaccaactacttggaccgagagtctttggccgccttgatcgaggccctcaaggactttgagggtggagtgttggtcatcacccacaaccgagagttctcagagtccgtgtgcaaggaaatctgggccatgaaggacggacaccttatcgcttccggtcacgactgggtcgagagcggtcagggttcgggtgcccgaatcgaccagcgcaaggaggacgaggaggaccagttcgacgccatgggcaacaagattgtcaaggtcgagaaagccaagaaggctagcgccgctgagcttcgaaagaagaagaaggagaggatggcccgaaggaagcgaggcgagggtgagtcttacgatagggttccgccatctcgtcgtggacacgagctgatcgtctgtcgtcttgtcgtttacagaggtcctcaccgacgaggacgagctatagaagggtaccgtgtagcccacccggctttccgttgcgtttctatcccactccaccactcgcacctcggtgcatgtattgcctcttttaatctctctcatgacgatccatcttacattcgtttgcaattgtccactttgcgaagctgtctaccagggtgtttgttgtctgcctgcggctatctctttccatgaactcggatgaacagcaggggtggttgcaaacacacagttttctccaacgtgtgagggaaatcagcggactcgactcttccctggattgtgtcacgctctttccgagccgtccacacggccggacccacacagccgaattctctcaagcctagcctattcaatcgtatcccaagtctcgttctcaactgctaaaagatagatgaccgtgacacctacgatcaagcagtgaattgatatttgattccggtcatcggcgatcccggtgcctccgcccagctttggacaatcggctacaagctaaaaggtaacatgatgatgtgtgttccacgatattagatgattgatttgcctgcgcctattgccgagtgtctatctatcaatctttgccgggacttcgactcggtcagacctatcttatgaggcctgaccaacagccatgacgacacggaagcttacgacctcacagcaggtccggttgacgcagtacctagacgatgagcttctaaatgtcgagagggatgtgaataaacggtgaatcacgatcagtttacgacgaagcacgtccctttattgatgcttgaatgcatttcgtcccagaacagatccagaatcaccgattccatcgctctcgaccttgatcaaccggctgactccgatcatgaacctgatcatgtcgattccctcgtcggagccgacgggttacattcggatacaatacttgcttagattcacctcgggcatgcgagaatggttctctgggtatagtatcaccggtcaaggggtcgtcgagagcatctctgcggctcaaaggaggacgagaaagaacagctccaagttgaccgtcgaggcctcgaggagaagcctgaaaagcctgttggaattcgtcgagcggttagatctggcttggatggcgctcttgacagggatttcaggacgtgaaactaccagccaatctgatcagaaagtagaggtgaaagaggaggcggaagacgccttgaacaatgctcaaagtggctcgtatcggaacctcgtctcgatcaccgataagtgaggctgtcgtagcgctatcgcgagtcaggcaggtctgagagctgattttctcttgaccgaaccttagaattcgcctccgctcctcgatcttgtctctccgtgagcgcatattatcctgggccgagaaacagtcgtacttgctcgccgaagcgaaggaagggcagtctgctgaacaaagcgagacggacctatcggcactggaagacgaggtcgaaaacgaagctgaatcgatggtcgacgacgacggcgtctttcgatggagggccgaaatcgtgaatagcatgagaaggaccttggaagcgctcgacctgtagtcatacctgacacatccgctatccatcatacgcacaaaacaatgacaaacttgcataggtattcaacgactaagattgcacaaaacgctggctgtgatacaaaaatatatgcgaaatgaaaacgtccaccgagattcgactttctggcctctcttttaagttccccgtaggtccgacaacctacgcttcttgagcgggtgattcggatgagcgtccagcacggccaaagcttctttgacagcatacgaatggacttcgaatcgccggcgcttgctccctgtggatgtggactacagtacaagaacctcgagtcagtacccttggaaccagggaggacgaacagatcggactcacctcgacgggccgtgctttcggtatcgagacgctcgcaaacggatcaggtttctcgaaccgaggcgagggggaaggcgcgcccggttgaccgatgcatcttgtccccctggccacgacgtccgccaacatggccaacgaggcaaacttggcgttcggatgggcctagaaacatcgagacacggagacacgatcagtcggacagtcgagttgagagcaatcctggcctgctcgcccgaacctacctttaatgtcttccacgcctcgtccgcgctcagggtgacgtcgacctcgtgcccgtgtggtgccaattgcgaaatcttttcctcccatgtccctgtcggcatggacgatccagacaaactagtcgccgcagcgttcgcgtaccctcgctcgtgctgatgttgatgagaatgtggctgctcgggattgacgagctcgtcgtccccgcaatgcttgtcgagcgtaccgcaaagcttggaattaccacaacacttgatatcgagatactctgcctcgatatcggtcgggctgctcgagactttatctgaacccatcgactgagactgagcaggtccagcggtcgaggataccgaggtgatggaagacctcgttcggttgataggtaccggggccgtcatcggagccggagtcggatttgacgcggaggccttgatgttttgctgacttgaacaattctcacatcgatgacccggctcgttgttacacatcgacttggacaagctttcacaaaactcgcgacctgtagacaagcacgatccctggatcagcccgaatccgccccgatatacccggcccgatcgagacgatactcaccgaaatcatcatccttgcaagccggacagtttcgaggatctccgctacattccgccggagcgatgtacgatggtgaatcctgaccgtcctgaagtaccgcgggggagacggcaaagataggagccttcttgatcccaaagatcgcactggatacacctgttccgttattgctggcatttgcgccgccgttatccggacgtcgacggcgaagcgggacggccgcttggaccgggggcaggttgtccagaatcgacgttgatttgacggccgcggtgatttcggcgtgataagtcggactcagttgtttagtcacggggttgacgatccccatgccttgtccagacgtaggatcggcgttgaacgtaaacacgccggccacttcgccccccgcgttgtcgtatccgtgtcgatgatcgccgttgttcttgttgttgcgttcgttctccctgacgatcctgcacacgcagacggactcgataccctcgcagaatccgcaggccatgtccatggcgacctgacgcgagaaggaatcgacgtcgtcgtcgctcggtaaggaagtcatgcgttgagaaggtcgggatcggtccaggataggtggcgagggaccgggtggggtcggggtcgggttggaaggggagatcgtttcgagcgccatcatgttgggtctgtaatctcgctcgtcttcatcatcctcttcctcgtcatcatcgtcatcgtcttcttcgtcttcgacctgatggacgtcgatcgatccgctcccacgtctcgatcccacgaccgtcgccgccgcggatgtggatgccgagactgacccttgtcctctcatctccctacgtgccctctcgtatcccttcttttctgcctcgactatcaacctctctgttcttcccagcttgctcctcatctctaccagagcaccctccaaccgcttgacctcgacatcctttcctctgcactctctctcccgcacgtttagatcccggcgtacgagggagagctctaccttgatcttggtattctcatccttcatcgcccgggctgtcgcctggagagcgacattgcgttgaatctctcccttttcgaacgattcgatacgagcttctagcgaggcgacgtattcggtcttgcgttcgcgaaacgctcgttgggcgtctctactgccggacgttgcggacggggcgggtttctgctgcgagcgagaccggaatgagaagcgggttattggggggatcagcacgatgcgttccgtcggccctggttgatcgcaaccagtcatgcggtgtagctgggacgatgtacttaccgactgaatggcggactcgatggccactttactggacttcctacctggtttcgctcgttgcgggatgacccattctgattttgcctttgcgaatacgatccccgtggacgaggacgtctcgcggttagctgccatggtcgtaggctctagttcgatgggatcctttatagatagtagagaggtgtttctccaactttgagattggctactggttatgtgaagtgaacgagatgaatagacgattgaacgaagatggattgatgatgatgggcgggggggtcagggtgaatgggagacggtagcgggagaggttagacttgacgttgaccactaaaccctgatgatttcttgcaatctgataaggaaaatcggatccacctcgcagagtaagaggggggaaagttccgagaatgccgaacgacaggtcttgacttcaatcaccgcatcgccactcatacatcacatgttctgcctatccacacctgctcgctctcctttcaatcgatcatcgtgccacctgagttgatgcagctccaaaatcttgaggaggcgactccctcccttgccctctcagtggtgtctctgtgtctggcgcgcgcggaaatcttaatcacatcagataacccgaaaggcggaggaagacatcctagccatcgcacgacacttccctcgcttctctcttcccaaataccaccaccgccgcttggtaggacaatgccctgctaccacgctccagtcctgtgtctcatgaagcctagcgttcctcttgcccgaacggccagctcgatgggcaaaggaaagccagaaagagtgtgcccgtgtatatcatcccgctgtaccggggccgagctgtcaaggttccgagcccggcccgatagtagtcaacaccgccatgaatcacgtgatatcacaaccgaccttcccggccatcatatacctagcaccgacctgcttcgtatgttccatccaagggcatggcaaggacgaggatcaacacgcatcttccgtacatctgagaaggggttcataggtgtctcgaggtcgagacttttctgatgggattcgagcagccgggatgactttggtcagctcaacgaaacgtgaaacgccgccacactccgcgtaatctgtggtcacgtccatccgctcgccgacctggtgcgctcgtctggctctattgacatatcatttccctgtctggctcatttcacgttgaactcttattgatagtctgactgataattatatgattgcttgctgacgtttcagtcggcgcttgtcggacctccacctcggtcttcggagcgcaaccttccagccagcatcgacgacgacgaggtccatcttgctgtgacctgggtgacaggtgacgtcgaccagctcacgccacactcctcgatgatgacgtctcaccatcttgactctggcgaggattccttcccccccccctccgtcccagctagcttgtgacacctcataacctcatcgtccgctacgttgtgtcccatgtcagcatcccttctttccacttgtataagaccacgactccctttcactctcatgtctatccgaatcgttcgaactcttggtgtgggaagaaaacagctatcccaccttcgatccaacaggacttgcctacctatcacctctgcttgtttgcctcataccctggctcagcagatacaaccaattcagagacagaaccgaacgttcacatctaccccgattgtcaagtacgaaatgtcgcaagggtctcaccctcatctcaagatagccgagctgtttgatgtcagcggattgaccgtcgccgtcaccgtgagcactcgcaccctcgctctatattccagcttgatctctcggctgacgttcatacttgcctcgatcgcctccgactacttcgatctgctttggcttcaatatagggtgcaggcaccgggatcggtctgatgatcactctcgccatgatcgagaacggtgccaaagtgttcgccatcgggcgtcatcatgagaaccttgacgagatcgtcaagcgttactctggggatggcaaggagcggggtgtgatcgttcctatcgttggcgatgtcaccgacaaggaaagcttaaaatcgctcgtcaaggagatcgggggacaggcggagggcgggattcaggtcctgtgagctgccggctgcatctttcgagaggcatgatggaggaacgtgaccgctgactcgatccggggacaggtttaacaatgccggggtcgctggagagggctccagggaaggctgggaagatgtcgattccaaggaccccaacgctatctccaagcagatgctcgagagcacttacaaagagtgagtagaagttatgactgactggcttcagacgtgggacgctgaggacttgtcggcctggggtccagatgggaagacactctcaggaccaacaccacagccgcatacgtgagtaacggcagtcttctgttaagaagtatacgagtatttcgcggacatcctgacgcacgaatgccatgtcaatgttgcagttcaccgctgccgccttcttgccgctcttgtccaagggcaagaacagcgtcaagggatatgctagccaggtaagaccttcgcccggtcagttgaaaatgcctaggtcaataactcacccctctgccttcggtcgtctctccggaagattgtcaacaccacctcgatctcgggtgtgatgaaacgcgcttcgggcggacaattcgcctatgccgccagcaaggccgcgacgttccagatgaccaaggtgctcgccactgagctcatggagactggaattaggtgcaaccagatcgctcccggtaagtcccatctccttgcttgcatggcacaccagaaccttccggctgatgagcgacatcgtcttgttcatgcgaaccaggcgtatttccctcgggcatgaccgctggttcagtcgaaaaggaccaaaaatccgacttgtcaggaactggcaagggcgagagcaacccggcgggcaggcccggaagcgagaaggatatggctggatgcgcattgttcttggccagtcgggctgctatctacatgaacggacaggtacgtgggggtgagaatagtctgggccatcattcttaatgactgatttttacgtgcaacgtgtcgcaggccatcatcccggatggaggagccactctgtccggaaactcgagcttgtagatcgagttgtctcatgtatcctttacaaatcaattcaccggaatgtatgcaccacaaagagaagaggttgtgctaggcacgatcatatcccattataacacattggggccatcgagcaggcgcatgtatgtggctcactctccgatcagaaaagcacgtgtaccgactagtacagtacgctaccgatgtgcattctcaacgctgtatcatattggattcagcccttcgatcactcgctccagaaattcatcgatggcaaatttgccgaagcgagcatctgagctccagactctccatccgggttcagcaatagtatcactcatatggagaggaacgtggatagtacttgatcaaatgtcgcaggccttgattatgtgtgcctcactgtgcccgcggctctaaagtacgtcaaggcgcagtcagtgctggaagctgagggcgggtcaacgagggacaaggggctccggcggcccctctcttttgtttcttttacattttaacatttttgtaattacgctgcggggtttcatgcctccagcttcgacccgctgcaggtgatgaagatcaattcactggggagagaaaacgaggttgacgcttatacatcggtgagcaactcgtatccaacacggtttcccatgacatgcgcttgagccttccgggtcccattccgcgtcgacgcggccttgcgctcgattgttaggggttccaccgttaatgctgaagtggacttgtcctgtacgtttctcaccttatttgaccgaggtcttgatggtaccgacatcgatgcggaaactcacttattttcatgccattgacgcgtctctcgcccaggtgtttccaacttcactctccagcgacaacaatcaaggaggcggaaaggcttttggagagagatctgtaagcatgttttacgagaccggtgctccatcgagatctaaggtgtgtttgtgggtggcagagatgatcattcaagactcccttgctacacagaattggcaaaccgtaaactcggtcgagcttcacagttcaggcgtgacaacacggggaaaagaggtagcgaccgatattctggtcgttaacatcactctttccccgacgttgccgtttaagacggacgagtgattgttcactgcctgcaagactttttcaatatctcctccatatgcagtccttgccaactcattgtaccggtctcgagtagtacccgatctgcatgacacaatggagagcataccggtagagacgatggtgtcgggatgcggtcgagcaaaacagccagctcgtcgatgaattcccggacatgcgtcgttaccccccatgatcgtcactcgtcgacgcaactgccgcccacactctggtttcgaatcgattgaataaagaaaacaacaagccgtcgtctcatccctcgtctctggcccgactcgttttgcgggtcaaaagctgtattgcgcgttccatgtggccttttactctacaacgtgataagtccggggagccttgaagcttcccatctcgacgggagcgtcgaacgtggcactgcggggacgaacatgtcagtattgttcaccgaatgcgatccatcacgccggaatgaaccggtcggtttactcacgcgcttcggtaccttcgcaagtacttgatggcgtgctcctcgatcgtctcgggttccatgttcaggtgagcccacgtcttgacgcgttctccaccgacgccgaccatggcctcgagaccggtcgattcgggctgttcccacccggcgggaacgtcctgtgcggccgatttgggggaagccgaggcgtcgtcgatgtactttcggacgacctcgtccgggctgacggtgggccaccagagcgcccggttgataatgttggagatcagcatggcgatgggtttagggaggacgggtgcggcgtgggatttcagggtaaaggcctcgacgagtttgatgaggttcgagtaggtgtaagttcgaggaccgggcagggcaaacgtggcaccgatcgacgtcttgggtgcgccgagcatgacggcgagggcctcggcgacgtccaagacgtgggcgggacgggtccgggtctgaccgttgttcaagtggaacaaggtggggtacgctacggtccggacgatctcgtcagccgtcacgcacgctgcttgtgaagagacggatggacggtccatcccgacgggcgagcctcggaactcacaagccactgcgttcaacaaccaatcctctcctccaaacaagggtccgggcctagcgatggtcgcctcggggaaagcctccctgacggctacctctccctcgtacttggtcctgtaaaaggccgactcggaatccgccttggcgttcaagtgggagacgtggatgaagcgcgagacgtcgttttcccgagcgatcttggcgatctgagcggccccgctgcggggtcaggttcggagtgttgatttcagcaccggggtgtcgagatctcgagcgatacaagcagcccacgaccgactcacgtcacgttgacatcatcgtacttgtagttcctgcccgatcacgacgtcatggcctggatgattagccacccaaaccttgcctgcgttactcctcccaaaggagctccccgagcgattctcacctggtctcgtaatcccttccggtcaagttgtagacgacgtccgaatgcctcaggcactcttcgatctgctcgggctttctcaaatcccattcctaacaagacgtttgcggtgccgtatcacgcatcacgcatgcatcaagatcccggaacagcccctgagaatcagcatctgggatgcgtgaagggaaattccccaggatccccagaagaagaagagagaagggggggggggggggggggtggtagttactcacgagcgggatgatctgaccaagatcgcccatgaccttcaagtgacgtttgtcatcctcgtctcggtaagggacgatgaccctcgatccggatttccctgttgaccgtccgattcgattcgattcaagacgaggagcgtacgatcatgtgatcattgatcagcttctcgatgtcttcccgggaccacccagtcgggtatctctgctcctcctcgtctccagtcccacccgacccagatgggcgtatgtgcgtgcttaccgagcttgtgtacgagataacggcccaagaacccggtacatccgaacacggtgaccgtgtgccctgaagcggccgaccgacctccggtgggtggaccatgtttgatgataggtttgacgttccccgatgacttgttacctgtgatgagtaggtcatgggcgaactgttggtaggtgtccgtaggggtgggggtcgaggttaggttgcagggtcgaggtgaggttcgatttcgatttcagcgaggttcggatgactgggatcagccggcccgctcagaaggagtaagtatgtgacttaccctcttggataccctgttgggggtgaccgctggtgtgttcaacccggcacggatggaagaagctaaaggcgatgtgcgagagtcgagcccatcgtcagtgttcgcggtgcaggacgttcccggtgtcggtgcacctaccgctcctgaaggttgccattctctctctctctctcttttgtctaatcttcctccgaatctagtgctagtggttgagaactggggatagctaagtaggctatgattatcatatgaccctctctctctacacctcctttggtctgtctttgagtcttggccaaccaggttttgcgcttttcaacgcgcgcgcaaagtcaaagccaagaagggcagcgagggaaggggggcaacaacccatagctgcattgaacggtcatcttatagctcacaactcatcattcgattgcatatcatgctgagatgttggggttcactcaacaaggagtctctgtcggtgctcttgaaaattcgagctagaatcgagtcttttcgaagcaggtcgatttggctctgctcgctgctcgacagacgcgacaagtccaccatggtatgcttgccagtgacgctttcctgccatcgatcgatttgtcggccagcaccatgatcacatgtcatacgattgtaccctgctctgtatgctaccctcgaagctgtctgtaatgaatggtcgaaggttgtttgtttgatttgatgaaatatgacatttgtttcaggtggaaataactctaatctcgctctccttcctgtttccccatgacgcacatcatcgtgaatggaggatatcacaatcgataaagtatgtaggtatataggtatcgatctactggatctactgatatagctgtctttatcatccattatatacacagcgtaccctgtcgcactcctcgagcggcctcgttctcctcctcatcctccctcttcttagagtctcccctcgacccgccttgacctgcctcgacgatggctccctctcctatccggatattcgccctccctcttacccgatcttccccatcccgatccatcccacccgtgatctactggcacgtctctcaagacgtcaagatcccgacatccggcaagaacatccaatcgtcttccgacccttcgaaacaggtcgactggaaacgtccttccacctggccaccaccttccacctggccctccgagtcggtggccaaggcttccgacctgtggttacagtggggtactaaaccgacgtacgaggttgctggggaaaagacgttgcaagagagggtgacggagtggaagtattggacttggacgaaaggggaagggttgatggatcgggtcgaatgggaagagtaagtccccccgcccgtgtggatccacctctacaggggcagaggcaggtaatggcgatgcaggggacaccggtcagctgacatcccgatcgatcgatccgactcctcggctcgactcgtaggtgggcgttgaagagcatcaacccgagcgtcaaggtgggcgaagaggtcgtcgcgacggacgataccggtgtaaaatccgtccatcctaccaagggtagctcgccccgggtcagtagatgcccacctcggaacagcccagcttgacccagaatcaacgctgagataagaaaccttggaactttgcagatacccctcttgatcccgcaccacccatccatcgacgcgtccaccgtactcggcgagctagaatcctacctggagcgtcgaatcccttatcacaaaaagtacatgaaacaagcggccgctctgacgcccatcgtactcccctttggtctcctgcccctcgtacccaatttcccctttctcatcgcggcgtggaggtgtttctcgcactaccgagcgtggaagggggcggaatggttgttgaggttggttcaggatggcaaggtcgaggtcaaggtcgaggacaaactcgacgaggcgctcagaccggttcggagcgagatcatcgagggtggacggacggggagcggacctgtcgagggcggggatcatgcgccggatgagacgagtacgccaaaagggttgatcatgcagggtgagggcaagcaagagtccgaagtcgaggaggagaacgcgaccttgcagacgaggcacattttggaagaaggaacgacgacctctgaaagttctaccggacggcaacaagctaccaagtcgacccagaccgcatcagccggatcgaccggtgtacccgatccgaaggaccaagaagtcgcccccgacgctaccggcacgccagccagccagatttaccacccgaaaacctctgaccggtcttccaccacgtccgaatccacagaaggagaggccgaggaggaagcgaggttgaccatggagaacattcctcggttgaaagagatgttcgggttgagggcttccgagattgtcgacttgacccgggcggtcatgcaaatcaaggacaaggcggacagggcgatcaaggaggagcaaaaataggactcgtgcgtgcgtgtgcgggcgtaggatcgcagggatgatagagcgtggatttcagacgagtgttgtgggtgtgcgtgtgtatgtgtgacggtcaggatcgaccggtatgagatgaaccgataccccccccccaacatttggatatgctgtcttgatgggctgcgtcacgtgctcatttccttcgatgacgtcatcgaaatctcccagaaaccacgtggctcgcaatcgctaaatgtcgatcatcccaccagagtgtgttatctaagtcgaccggctttgatagatactcacttccacaatacctagaccacaggtcatagcgctgcaggctacaatcactgtagataccccgagcgactctagtcacaatgcaagccagtcatccgcaaggtgcgatcgaaggtgagtgctcgatcagtcgtccgtcggcatgcgagcggatctgaccggttggggcatgtcgatcgatcatagaatttcaggctgggatcttttccaacgatccgtaagcttccactccaggagtctctccagccgaatgcagccgtttgatttcgaacaactatagtgttgaatacaatgccgcggtcaacctctacgtcgaggcgagtacacctcttaccgagggcctccctgtgactacctcgggactgacgacagacctaccttgctccttcgtagccccatgcgagctacatttccagcttgatctccactcacggggcttccaagatcaagaacgttctcgctctcaaaaagttgttcatcagggagacgagggtggacaagagaaaatcggtcaagtctccggcttggggagccaaatgggatgaggagtgagtgtaccatagtgacgcccaaaccgacagcagtgacttatgagagctatcgcgcctgatccgtcctacagttctcaggtctactttgtcccgacgttgacaacctacgggttgccgtttgccttgcccatcatcgacctctcttttaccttccctacctcgcttacgcttcatctgaacatgactgaggagagcgacatcgagagcgtcgacgaggacgacttcagatggagatccagatcgggcgccgattcgaattcgagcggggagagggagaagaggtatgtcattaccaagtgggaagaaaggggaccagtggattcaatcatcggatttggagggaagaccattcaaaagctgtaagttgcgtcccatgagcaagtctccgatcgatattgacggccgacaatcacgtctctttcatcctctcatttttgcacaggcacgtatcgtccctgcgacccatgaccaccttgatcctcctcctgctcgccggcgccaagcactttgtccatacccacccattgtccgatggaatcttcaactttctcatcgctgccattgtcacctttgtcaccgaggcgagagatatcgtgcttgctgaactcagctcgaaacatcctaggatggtctaccataccgagtaagcgctcggcccatattgctgtcgcatcataccggcgggctgacaatccgcatgcttttctagcaactactcgaagacgatcaagaggtcgactcattctgctcagtcttccatttcaagcgccgttgactctcgcatcaccgcccgaccccaaagcccggcgtcgtcggtgaagagtaggaagagcgttcgtgcacctttccgtcctccctcggccggatcgcctaccacgtcggcttccaccgtctttgctaccggcgccgtgtcgaaaaagcctcacgacttgacggaaaagggacacgcttcattcgccgaggtcgtcaaggagggggatctcgacacccacggcggtcactcgcgcaccacggcggacggtgggaagaagaagaagaagggtgacgagcctcgcaagcgatcgacggcgaccacgaacgtcgatgaaggacatccttcgtacgcccaggtagtcgtcgaaggcgacgaggagcatcatcatcagcctcaccaatcggacgagcaccatcaccggcaagaacatacggggtctcacagtcatcctgatcctcatgaccacgacgatcatgcctcgtatgccgaagttgccgccgacggtgtggtcgctcacgagcattgagctttgtgtttctaaagcctacggggcaaggtgaaacgctggtccaaagccacgacccgcccacgtccccggacactttcctacgacctgcacagttcctactcgaaaatagatgagagacaccatagtccattacaatgttgtacgtcagatagaaaccagtaatgtcggagagaaaatcggtatcaatgtaccgctccgaaagcgccgatagtcgactccgtcgcgagaacaagcgcgcaggatgagaatagatgtcctctaccttttcgctttggtagaaaaaccgaaatgaacagtatacctcggaagcttactctctgtctggttgtactgacggggacggaagaaggtatgctgtcagcggtataacggagcaggccgaagcagcgatagtcgacgaatccctggacgtcgaatgcagtggactcgacggtgtagatatttatcgtggctgtggcgggagcaacgtacgactggtggtgacaagctaggaacataacgatggctttgccggccaagacatggatcctggtgggagccaggaacgattcttaccaaagcaccccggcagtcgctactgattattcctggtactctttatgcatcatgaacgtttcaacacgactgaattgggacgaggcgggtaaatgcaagctcgacagcccgaaacggttcaaggttccggttcaaggcctattacggttcaaagacctattacggcaacagccaaaccagatcgctagcttaaactatccaaatgccgactccaggttcgtggagttgaaaattcctttggacgctttgacatcatctggtgttagggttaggggcagcatgggctcatcgagaaccgtcgacagtgggtaactccctgaagtacgactgttctgttctgagcggttaccctttggcgcctagatttcttcgtccccgctcattacgcctcttctccagcagcccggacctcccttgatataatgaaaggtcagcagcctcccgcttcttctagctttctgcaaaacgccaaatctccttgtgctgactctgcgggtatggcccacaatccgggtcgtcctcgcctttcgcttgacctcatcggctacagctcttgcgatacacgcagggtcgtttgcatgtccggccctgtgcacctgcggtcaacctacggatcgaccgtccatcttcgcgcagaggcacctgtactttctggaaccagccggataggcgcatctgagccgaggattcgtcgactcgcaagctggtgcaacgtccgtctgaccgctcagtcccgtaatcaaatcgatcttgtcaatgccgttctttgtatatccagcatcgtcgttctctttctagtcgttacaacaatcgtccaaccttggtatcgattgttcgtcatcttcctacaggccagcatcgtccgccctatgtcgccatccaccaccaccaccatcgctctgaccccggcgcgcgtgcgtcctcgtccatctggcaaccatactgtcgcccactcgggattactgcccagattgagactggattagatgacgatctcggcgtccccctctccgacaatcttcttgggctttttgaaaaactccaaccgacgttgttcccgctcgggtcggggcatcgacagacggtcggtaccggtcaacgactatgccgtcgagttcaatcgtgtaagatcgagacgagggaacaaagaggaggttgtacgtgggtcatccatcagcttggtacttcctgatcgggtcgatgtttcgagtgactgacctttccagccgcgtcgaacgttccgaggagggtaccgatggcggcacatgaagcgaaagcgatggggaacgatccggctgttgtgattcgaaggccaagacgaagacgggaacgaaatcgagccggacgaccgttagcattgacaagtctcgagcgggttcaggtcggaataccgtgtgacgcacctcgagcaccagcgaagaatccggcggcacaacccccagcagcagagttcatggcgtcgtccgtctgtggaaaccgaatatggcgggtggtccggatttcgaatcagtccgggctgggtactattggaatcacgcctgcaagtccaaagctcgacgcacctctcgcaaattggcagtcacggcctgggtgaaagcgtaggtgaatcccattcccgctattatcccccaggaagagaaccccactcagctaacgacctcgtggaatgcccgcgtccccgaatcgacactcaccgaagaagctgatggtacctcctgtcctggtaaagatacccatggctcccctatcgtgcttgtccaaagcgttttgcacggcactgacgagcagaccgacaccggcgctggtcacggtgaccttggcggcagtggagagagcggggtgagattggaagacgggctcattaggagcgtggatgaagaatgccgagggtttgtaggtggccgtgctggacccggacgacgaggcctggggtgtcgggagaggtgggaggagagggtgaggagccattttttttcggggacgtgaacgagctcgtggatatgtatcgaatgggactacaagcgagcgagcgagatcgttgtgagactactttaaagttgtacaatatcatttggaccatttcgacgacattggcaggtcgaggattggcttgaggttagggcaaggctgagcgaagtgagcgcgtgtgcgacgcgtgagaaagcgaaattatggagcaaaggggagcgggaaggtggttgcgaggtcgaacgaagcagcttctcgattctcgatatcgacacagtcaaaagtctttgtatcgtcaacagcaacaactcgaccagtgacatcgcactgcatataggaaaagctcagaagcatccttttagcaaaaatggtatgttttcctaccccatctctgtactacccccaacattggcattgaaatggctaatcgctaaactttaccaccactcacagtcttacgaatcttcttacgacgcccctcctcctgcttcggcgaccggtccttccgagtgtgagtcaagcagacaaccacaacatgacgaccgcctcccatatctgaagtcgattccgaacctcatctcgtgcagctgctaggtaccccgaaggagacgctcctcgcggtggttacagcgactctggacgcgaccgtgacgtccgtgagcccagccgaggtcactacgatgcccccaaagaggattccagggactaccctcctcccagggatgaccgggaccgagataacggtcgtgactacggttcggcccctcgtggcggtcgaggtggatacgaaggtggtggtcgatccacgtgagtctcatcgtacaaaccgatcgttttcgactcggaacatccccgactgatccacttgggctcgacttgattcagcggcggacctcgtggtgcggtcgtcaagcccgagccgtccaactgtttgggagtctttggtttgtctttgaggaccaaggaggaggacctcgatcacatgttcaagcaatacggaaccgtcgagagcgtcaccatcgtctacgaccaaaaggtacggtctcacatcactttttcaccagtcacaaaacgacaccacagaaatctgacctcacaccctcctttggcccgcacgcagaccggacgttcgcgttgtttcgggttcatccagatggccacgaccgagcaggccaccatgtgcatcgaaaagctcaacggggtcgaccttcaaggccgaaacatgcgagtcgactactctactactcagaggccccacgaccctacccctggtgcctacatgggacacaagaggcctggtgagcgcatgcccgtatagccgagcggctcgtacacgcgaatcccccgttgatcgactccgtctttccccatacgcttcagaacgcgatacctaccacaccggttactctggcggtggtggatacggtggcggccgaggaggatactctcgcggtggatacgaggaccgtcgtcctcgatatgacgagtacgaccgatacgaccgtcgtggtggggatgattacgacaggcgtggtggacgtgacgacaggtacgatgattactaccgttacgattcgcattactacgaccgaagggataggtggggatatccaactgatcatgcgtttaggaaatgattgggcggaccttgctgatcgacgtggaatccatctgcttttcatcgggttgcacagggacaggtacgaccgtcgtgagaggagcccgcctaggaggagggagtactacgagtgagccagatcgtaactgggcagtgcaccggatctcgcgttactgatattcgaccggcgacatttgctagcagcgatgctcagcgagctccccgtcgttactccgactcgcccgaaccccgtgacgaccgcaaggaccgagacagggaccctcgtgctggaagcagggccgcttacgaagacgtccctccccccgccgatgcgaggtactgaaggaggcttctctccaccgctgctcttcagtctgccgggatttgcgagcccgtcgagcttgactagtgtacgggggaggaaaaaggcaagaccgagacaagaccgaacgcgggatctcgagcacaagagagagagagaacagagcgatcctgaaacgagaagagatctatcctacctgaaccgaacctatgcaagatttttccgatttcatgaaaccgttgacacaaaaaatgtatcaagagagatgaagctcttcaagtccattcaaatacggtcgggtcgaacagtcgggggtaaactactcgtcgccctgcgaatcgagcggacgcggttctcggaagtcaatagttcactctcgaggtaatgcaagtcggaatcatcgaagccagacaatcgagtggcacagcaatgactcttatcacgtaggccgtgtctgctttccgaaactgctgataaacatgattacagctatcagcccatctcccgtgtacttcaagccaagtcgcgacgtatccgcctcgggcccaatcggcatgctagaggggttgcgtttatctaggattcttgcaagttgttgcgggatgtcatggctaaccggaccatggttctagacgcatcgacccgaaatcaggcgaaacgagccagctacgaatgtatgcagagtgtcagagatctatgtacaaccgcaatctcgttgtcgtcgcatcccaaagcctggatgtcgattgtttgcttacctaagccaaattcgctcgagccggcgagggaagcgagaggttgacgacttcaaccttcttgaacgtctgaaattgctgcaaccatagagtgactcgctaccaccgtctttctatcctcaccttgcatctcacatcgtcgggaacggcttctcaagagcttcaatagcaccggtcgacgatatcacagggactttccgctgacaagatggctagtgtgcgtacagctgctccttccgatgaccacgacttagactgactttcagccccacaatcacaaccacaggctcaggagatcgaccagcactacaaggtgcattgcaggtgacgaatgacaatcctaccgacatcttggctaaggtcgaacgtcatttataacacagagctatctgcaagcgaggtaccagaacgtcgggacaagcagctttgcctacctgtttcgctatgcgttcctctgggcaggtgtatggctcggttcggtcacattgaccgatttctgtaagtgcaccgtcttttccattgtggaatacttgcaggagctgcccgtgcgaaactgatcctggatatcggtggctacctgccagtctctgctccgaacgctcagatcttctggacggcagccggtgctctcgtcatagctctaacatgcatctggccgatcttgcaattgagggagcgatctttgcgaagtaagcagattgttcgcatgatacgattcgaccgctcaatgttgaaaatttgcacattccgtagctgtggctcgtaccccacctcccgcggcatcgagctcgttgacgagcttgctcatgaggccttttgctggaccccctaccaggaggatcgtagcttggtattcgatcatctctatcgtctctaccatcactttctccgtgctctgggaagtcaggcatacggaggtcgaactcggactgttcaagagcaccgtgtaagcgctccttgcagccaatctctcacatctcttgacactgatatgtcccgagtgatcttttcagtcatctccctcatcatctcaacgagcggctggtcttccttctcatcggcaacttttggttcgcggcgttcctcggcttgtgggatgtatataccggcagatggaaccagccgaaatgggctagagacggggtaagcgagaatcatagaccacagagcgcgatctcgctctaatactggaggcatgctcgaaaacaggaaactcgcgggatgcgtttcgagcgagaagtgaagagcatcctagcctccgttcccttcatgtcggcattctttgttgttattttcaccttgggatggttgacatgtcgaactcaaattacgaggtggatcattcaactctcggccggtctcttgaggtgagtgcagatggcatgacgcttcgaggatgagcgagctgacgatcgggctcgaatacaggcctttcctcatccggttcgcaaggtaccgtttcgatatcgggtttggcctcatctgccgattgatcacgctgtgcatcaatactggcatcatcttgcgtttgcccaaggtctttttcgacgtcaacgcaagccaggtaggttccaatttcatggactcctctgcgcccagaaacgagtgtctgaccatggtcaccgaatagccactcgacttttcaccgcttacgagcaagatgaaaggcactgatgccgagaaatatcttaccacggcgctgtactcgaacgatgattacctcctggtgagcgcgagattttcgttcttgcttctctctcgggcgctgaaaagtttgttcgccggtcgctctgtcagaattttaccgcctttgagtgggccgatcggtcgcatcagtctgccaaaaggaaagcgatccttgaggatctcagcaccaagccgaccgcttggaacaatctgtggaacggactgatctcgcaaatcgaaaagagcctgaggattctgcagaccaggaacggcaagctgcttccatcgacacctgctcaaccggttaccgcgccgccctcgatccctaccttgtctgcgaacaaagagcgagccccggccgtacgctccttagctggacccggggttgccaagcaggtggacaatgctacggaaaaggccgaacaagccgccattaccgtctcgaatgccgtagcatcctcttggaccgctgccaaaccgggtatcaacacgctcgtcaagcggaccacggcggccctctcgccctataccgacggccttgtcgagaacaattcgaccgcccaggcggtgatcaagcgtgccgaggaagtcaaagccggcgtcgagggcatgaaacagcagatgcagacgcttcaggggaaagccatcgaggttaacgaaaaggcgaaatcgacgatcgagagcaagacgtggtggagacaacagtggaacgacaacaagagcgcctggcgtgcaaagaatgtggcctctgggatcttcgtcgacacgggtgatcggatcgaacgggtctttgccaggcgatgggcggaggaggagatcgagagcgtcttgcccaggcggaagatcgatttggggttgatcaggagtgagtcttccggcggccctgtcgatggtggatacatggcggaaaggggaaactgaagtgtttttcgaatgactagccctatcggctttcatcgctggctcttacgacgaagacccgtacggtcaggtgcagcagaatgttccgacagctttgtcttcctttgcggcgtatcactcggcgctgcttgggttgatcgacgatatcaagagtggagccgcacagacggagagtcccatctggcaagaagaagtagatgtcgtcgtccgcgagatgatcgatcctgtcaggctaggtaagcccgttcggaatcggtccagagcgtggatactgaccgagtttgagctgttggtaactgtcagcgatcgagaatggagtgagacggatccagtccacctttggcaagagcatgaaggcgtttgagctgtcatcaggtcttacgagctggatcgacgggatcaaggatggtgaccagcagtcgtagtcggatcatatggggagcatcacgtgggcagactgtggtagcttccagcgtggtgtttctctgctggttcgtgtttctgtttaccggatgcatatcatcatcattatcattaccgaggatcgaaggagcttgttgtgaatttgtcaatgcgcgttactgtacgacacgacgagagggtcggtgactgatcgaccacatgatcagaccggaagcaaattacctatcagcagctggggcaagggagagacagggtttctattgtatttgcttccgacaacttatccgcgttgtcattcacaacctgctttgactgatccaatgtgacaaagcgatgcatcgaatggaaatatatatacaagcacaagattcagtccaggaaatggtggatggcaagatgggacaaagggttcactctcacaagctccgatcttctcatagcaactcgtctcgctctcctccacccatcgccatcaaataaacatgctcaacgttgtcatcatcggagcctcgagtgcgggtcacaccatcgccgcgcaactcgcacccaagctccctagcacccatcgaatcgtgatcatcgacgccgctcccacctcgtactggcccatcgccagtcttcgagcggccgtcgttcccggatgggaatccaaagtctatcacaggttggagcagaagaactttttccccgccagtagcaagaacgtcttggtccatcaaagggtcgtcgccgtcgagtcttcctcgatcgtcctcgaaggcgagtttgagggttccaaccgagtcccttttgacgtaagtcggcgcgtcgaacgtgatggcagaacgtaacgatccggagctcatctctacatgaaacgcggcttcttctatattgttgatgttccccaggctctcgtctttgcgaccggtgcttcgcagcctttccccatgcgacccaagcaagaatggtctgccgaagagatcgagcgacatttcaaggtcatgcagagagagattgccgaatcccagaacattgtcgtcatgggcggaggtcctaccggtatcgaattcgtcggagtaggttgattaaccgcttggatctgactcggggtcgtcgcatgctgatcatctcgtggaacgcggtcttaggaattgatcggcaactttacgggttccaaggccaagaacattacgctcgtacaccgcaagtctcaactgatcgacgagcgggcttacaagaagctcgccacgacgctcgagcaaaagctccgaacgtccggtgtcaatctcgtcctgggcgacgaacaccttgctggacctgacttccacgttggcaagcaggctcccggatcggtcgttcgaaccaagcagggcaaagagttccccgccgactacgtctttgtcgccgtcgggaacgttcccaatacccaactcgtcgaagaggcggatccgtcggctgtttcagatcgcaagttgatcaaggtcaacgatcaactgcaggtaagttcgacgcttttgctggattccagcttttgaagtacgaggacgagcatcactggctgacgtggacgtcgttctcccctgctggatcaggttaaatcgaccttttttgccactcccaacgtctttgctgccggagactgcgctgacgctcccggttggaggtcgttcgtctcgaccgagaccgaggcgggtacggtctctgccaacttgttggctgggatcaaaaggttgtcgctcaagaaccacaaggcgggaccccgggcgatggtcgtccctcttggcgagaacaacggggtgagtcttggtcctcgaacgaggccgacgagcatgcgctgggcctcgatcgttttgctgacgatccctaccccgttttcgcgcttcaggctggattcgcccagttgccccttttgggcgattcgatgttgcctgaattcttgatccccaaggtcaagggcaaggatctgttcacgagcaagtttcacgatcgattcttggcttgatagaggggcttgtttcggccatgcttgggttgtatgagttttccgcatactagatcttgtttctttacgttttccgtccggcctcgatgcacaagatataatatcccgtcaatatgtcacgcgatgggtctcggcgtagagagattcgtcatatgtgaacaagcaagtgaatgcggcttggcctgagccggttcgagctgaacacatgcagtcacgcctcgatctgcacgatcagagctgggtgagttggacaccactgatacgagattggactgtttgcacggtcaagacggggcaagcaaagagtcgtccacggagcccggcccgctggcgaggcgtgaatcccggtggcatcacaacagtttagagtggaggctggtcttgacgggaacatgtacatgaacatcgtgcggcagaccaatctcctcgcgatcattcgtccgtgcaaatggggatccgaaagacgaccatggtaaacgaaaatcatgacatatcatcatcatcgtacaagggacgaacccccgggccagaggctgcgctggggggaaaaggatgaatctagaaatccttgagctcgatactaggcccctgtgtcgatccgagtgagaccctgatgatcgagggtcctacattccagtgtcccatcgaggtcgagatcgagatcgaggcggcatgatcgtcagcacccccacgggaagactggtcgatgatccatgggacgtacctttttggggtttcgaggtctctgaagcgttacccgcttgtgtccgtcggacctcgttgataaagtgcttgacgttggcttccacgtcgtttgtcgggaaatgtatctacggggcgcgggggaggttccgaggtgggggttgttatacggggatgatgccgagtcggggagagactcgagtcagtctcggtatacggtctcgtattggtggagaatcaattgcttacccgtccgatagctgattgattatgaaacgagaatccagcaggacggtgggagaacagggaccgatccacacatcaggtcccgaaccgcctggctgatgacgacccaccggaccgactcacccgctctgacatgcccctgcctatcctctctccaatccatcaaccctttcgcctcttgtacggcgacgtccatgtcctcccttacggtccctcgcttggggttgggcatgagtcccttgggaccgaggaaacggcctactttcggggtgatcgtcgagaggagggaaggggtgcagatgactttggtcggcgagatttcaccggacaagacctgcgaggcggagaatgaggaaggtaggttcaagtggaaaatcacaaaaggtatcgagggggtgagcttgtgaacgacgttgcacaccgtcgccgtcgtcgtcgactcgcctgttgacacaattcttctccaccgacgaaactcgcccctgcgttccttgccatgtcggctagatctccttctgcaaagacgaggacgacctcttccctcttcctcacgtcccgggggagggagacccttcctctgagggggggcgcagacttgtctagccgggtgatgatctcgatctcgtatgcgttttcaggtcggtcggcttctagtgcctggtgggtagaggatgcgcggggtaagacgacgacgatcgtcaggatgagctctggtctaatcgatcgctaacggtgcggtgcctagcctagacttacttttaacaccgaagccgcgtcctggatgggcatggcgtccgggttgacgatgggtcccttgaaacgtttagccatggcgactgacgagctggcgaacgttctccgggtcgatcgctaacgggtggggtagggggtgggggggagagagaggttgaacatgaacgtcgagagggtcagctttgggggagactagcgtggtggtatggaaggtaagaaagaagctttaccgagctggtgctgcatactgctgtgcggcatgatttgatgcatgatccgacgatgaaattcgggattgacattgtgagactcgacgatgatgatgcgtggatgtcgagtgaacgactagtaagtatatgatgggattttgtgacttttgtcgaaggacttggtcgctctgatggcaagtagcagtgtagttagttgcgtaaaccctctcctagtacagtagtagcgtcaactaggagtcaacttgcaacttgattatgaaccgcggatttagaaatatcatcatcgtcttctatggtcgtcgtggtatcacgcgcgcgtcgacgtttgcttcatttccatcaatccatcaatcaattcaatcaatcgaccatcaattgccatcaaccgacatcgtcgtcgtcgtcgtcgtcgtcgtcgtcgacctagtctggtctatcaaatcctgcctgcatcacaacgaaacacactcctctggatgaacaaacgtaacttcaaccgacacatataggaaaccccgcaacctcgatctcggtccacccgtcggcaccacgacaatcaagcccggatcagacgaccaaccacgattcgtcatttctccacctgcccacccacccatcaaataatcaaacgtcgaccatcttgaaccccaacatacgaggtcgagcgagttgacgatgccaggtacagtcaactctctcccattgggagcaggatccacgaccatggccccggcagcggctcctcctacgcgaggcgaaatcgagaggaaactgagcatgaggtcggccgaacctcctagaccgagaagggtgagtacgcggggacctctcccttcgccaactcgtcccggtcgatatacatcccgtctagacctttctgaccgaggggcacgacgactcttctctcctgtccatgttggtcatcgtatcgtcgcttgttcggccacagcgaacatccaaccccggaccctcatacgtcggtcaatcgggtaatgaatccgactcgagtttccaatcctcgctcgctggacccatcaccgccacttccccgatcacatcctcgagcgcacccatctccaccaacatcaacgttaacgccaaccctgggatatccatggggatcactccgaataacctcggtctcaataacatcaacaatagcatcaacaacagtggtaataccaacaccaccaacaacaacaacaacaacaacaacatcggcggcgcaggcagtgttaacgccaatgccaacatcaacccgggttctatcgggggtagcaacctctccatcccaccgaaaggcaccagcgtcctctcctccatccaagaacgcggagaacgatccaaccctttccccggtggagggtcggatcaggagttcgaggagggggacgaggacgacgaagcagggaccgaattggaggaagacgaggtcctcgtcgggcaagatcgggtggacggggaagagttgaagagggggatggatgaggagagggtggtcaagagtgggtatttgatgaaaaagggcgagaagcgcaaggtgagccacccccccaccctgtgtcgtcgtcatcgtcgaagtcgtgctgatacccacatcgcgacgccagaattggaaaaagcggtggttcgtccttcggactgaaaagctggcttattaccgggacgaaaaggcgagtgaccccaacgcccgcctcttccaaaggatcgccactgatccgatcgttttctcttttcccgcattggacctctgtaggaatacatgttgtgccagatcctctctctcagggagatccacagcgtcgtctcggtccagttgaaaaagcacaattacgcgttcgggatcatcacggccaaacggactttttacgtccgggcgacgtctcagggcgagatggagggttgggtgcacgcggtgaatgacgcgaggaggaatttggccgagagcgatgaaaaggcgaggagtccgtcccacatggtcggtgctaccggtcagggacaggtgcagatgcagggtgccggtcagggaagcgccaacatcccgatccctatggcgacgggagcgtcagcgtcgacatcgatggggaacatccaacgtgggatggggcagagcatgtccacctccgaatcgtttggccagtacggggtctcgcctgggtacacggaaatgtcgctgggttcttacccagcccagagagggaccggatcgattcctcactcgtttggaggtgcgtatggatcgcagcctcagacgccgagcgcgcttcatcatctgggcgggtcgcaagtaggaggccaacagcagcagcagcaggggatgatgatacccggtatcgaatcccaattggacaagctggcgatcaacgatcaataccaggcgatgatgatgacccacgccggcgcgagtggtggtggtatgtacatcggggacacgagcgggatgaacacgccgacggtctctgatcgtgcccgggggatccccttggggacgacatcgacgagacgggatccctcgacgtcgtccgtctcgtccatccccatcgatgcgggtcccataccggcccaacaggcgatgggcgggtcgttccctcaagcgttcgtccccacatcgtcggacgaagaggacgacgcgtttgtgccccgttctttaggtcaaggtagcagcaatatcgccgggatgatggccatgagcccgacgaccaggttttcacccatgggtcatccccctaccccgggtggagggacgagtctggcttctcccacgccgatccagacggacccgaaaaaggtgatcttgaacgggtacctgatgaagttgggaacgaggggtaaaaagacgtggagaaagaggtggttcgtcctgacgagcggcgagttggtgtataccaagagtcacatggtgagtttccggcggtgcgtatctaggcggtgtcggagctgaccctggtcgtcgtcgtcgtcggggacaggataccaaggtgcaccgacagatcccactgagcaacatcctggacgccatcgaattcgaacccgtcgagcctgtcggttcagaggattcggattcggattcggcgagggacctggcacggagtccggcgagtccacggaaaccacgtcatttgcaccgggaacgtgcgagcgggagacatcagacgaggggtacggcggggtcgatggcggtgcaacacgctttccaggtcatcacccctcaacggacgttcaagttgtgtgccccctcggaggaagaagagatcaagtgggtggctgccttgagggcgttgatcaatcgggagagggggatgatgtccccgacgaccatcctggcgccggcgctccctgccatgtcgacctcggcttcggcgtcggggtcgatgctgggtcaaggacaaggatcggggcaagtgatagggttcggacaggggggaggtgggatgcccctaacccctaacccctaagtggttgtccctttgcgcgcgagaccctggacaacctgggaaaaccgcggacatctgaggaattccagaacgtcccagatgtcccaaatctgggatgccctttgtccgcaattgtcccaaatctgggacatcctttgtcctcgattggccgcgattgtcctcgattgtcctggcatcttgtccgctgcttcggcgtcgtcccagatctcccgacctcggacgtcccctgtcccatgtcggtctccgaggtttacaggatctgagaaaatcgtcgatcttgccaacttgtttttgaacgacattgttgccaagatcttcgacctcgaacagaccgctcaaagcgatcctcgatcgacgctcgtcttccaccgcgtcacctactcacagacacacgaaacgagtcaacaatatggagaggtacagcaagtggagagtacgtaccatcgtcggcatacctcgctcgaatctgacaacctcgtctttacaggacgccggcactggcatctcgccgttcgtacccctcgtcgcgccgtccgactcgtccctgcaactcgccgtctacaaagtcctggccaatgtcgtcgccgtcatcaagacggtggggctggtgttgatcggagcggtctatgcagtgctcgtggggttgcccagcaccttgttagtgagtttcgagccgattcgtaccgcaagtcgcatctcggtgctgatcaaaacggctgtccagggctggaactctgccctaactcccgtcatccttgaaccgctgtcaacgttgcttcttcgtttcctactgctggtcatgggttacgtcaacatctcgagcgaagtggtctccacgaaacgagggtcagttcgggtcgttgtcgaaagcacaaggctcgtgtctaaattctgtccgcaccgctcgcagacggacgacattgaaccccgtcatcaagccggtcaaaggggacctcgtcattgcaaactggacgtcgtatatcgagatcatctacctcgcattccggtgagcacgttcgctggcacacgtctacctcggccacaaaccaatctctcctcgacctgtcgcgaacagcttcaatcccacctttgccttgcccgttcatgcacctccagccctggctcctgatactcgcatgacaggacgtcacacgggcaccggatctgccaatatcgacctgccgtccgtctcggccgtcccccaatctccgctcctgggctacatgccggtcggcctcgcaacgatggtccgatcgaccggccagaccccggccacgacgtacgacacttggagatctggcaaggacaccaaactgtacagtctaaacgaactctgcgaccaggctcccggaccggtagttctctttcccgaaggcacgacgaccaacggacggggattacttcgattgagcaagggacttttcggaccggatggctggcaagtccccgtccgacagcgatccgtgtgggtctgctggttcaagtgagtccagtcgcgaagaacgcggtcgtcattgcgctgaactccgtcgtgcaccttcgatctaggcatcctcttccctcgtcgtacacaccgtcggcgactctacccatctcctcggcaagctcgccgacgtacaatccactttcgcacctctttcgctcggtcctgtgcacagtgaccccccgcaccttgactgtcaaatggctccacccaggatgttctcctagtagcggggactttctgcctagcgagatcctcggtctgaacgccgggtcgactttggttcagaacaagggtcttcgtaaccccgtcgcggtccaacaagacgagctactctcgcaatgtctggcctctgccatgttgcaactcgggagagccaagcagatcggcatgggctgggaggacaaggtgtcattcctggacttttggtcggagggaaagaagcgaacgggacgggccggggcgacgggaatagcgaaaaagaccaagtgatttctcgttggaaacatttcgatgcgatttgtcttgtctaaacggtccacacagccgtcactacaacaatgttacgcaaaccagcatacgatatcacattcggttcctaccggaccacctcgggcggcccgctgtcccacacccatatcaagcatcggcaagaaacgtcccgaccgaatgggccagcacgttgtgaactatagatcgactcgattagcccgtcattacggcctgaacagctgcgccccctcacctggccacgtcggatgcaggctgttgagccaaaagtagctcgacacgggaggattattgccaatctgcgtgttgggcgagggcgtcccgttggcataatcgtcgttgaacccagtgacgttgacgaaaccaaacacgtcgggattgttcaggaggctctaccagagtaagatgaacgacatgagggaccgtctatgatgaatagcgagatccactcgcactcacgttgaacaccggagccgtgtcgaacagcccgacataaccacctaaacgctgcaagcccggcacgacggtctttctcataccatcgttgaatacttgcgtggcggtctcgacttgcttagatacttgcttgccctggttctcaaacaatggagctcgcgagactggcggcacggtcaggaagagaaagttggggcaagacccgttgaaactcggtgccaaatcggtaaacaggtcgacgatggtgctacataaggcgaaagctcagcatcgaccgtcatgacgacccctcgcggactcactcctgctcggtcttgtaaaattcggccagcgacacgttggtccaggcatacgaattgccaacgctatgaacgcacgagtggcgactgggatcagctcagactgaccgaggacagacgctgctcgtcacgcactcgttgatcccgatccatatggcgaacaacgtgttatcgacccgccaatcagcctcggccggaggttgcgcaaagtattgcttgaagacgtcgacctggtctgcaacgatatagccaccttagggatctgcctcggcctaacacccggacgcaaagacccacccttcagagagaggaccgtaggaagataaggcgttacgtattcggcgtccaccgtggccccgccgtaagccaagttgtaacccttgagcgaaggattggccgcatatgtcgtgcgaaggacctgaatccaattcggtccgtttgccgaggtctggcgtcgttatacatcagatcaagactcggagagacgaccggactcgacgaccggacttgaacttacaaacccaggatcgaccgagttgatcccttgagaaacgttgtagcccgtcgccgtgtacgaatctccaaacgagaagctatagaggcatgttctagtcaatgcggggagtttcgacaagcgcgtcgcacggcgacaattacatatagtcgatgccggtccaattgaaagctgctccggcagaccctatgtcgtcgttgtgagccgaaagaccgttttctttccatccggccgtaggcatagcactagaggcctcgatcaacattaacaaggccaagagggatgagaaagtgaatcgcctggtcattgtcaaagagcgagatcgagaatatgagcaggataccgatgcgaggtcgacgtgcataaaaaccagccgatggcaagtccgcctgctgttccgtaccgttgtatatgaagcgcagaccgaggagccaccgatacgaacctccggcagagatcctcgaacaacctgccgttccgtgacggccgagcgatcgtccctagcccttctcgaagagcaaatattcgacctcgacggcgattcctcggcgagtcgtcaaatcatagattcggcactaagtatttgttagcgcccctcgagaatatgcgcaactgccgccgagcggagaaaagggagcgaatatccttgttcgactctcgtgccgttattgatactccgtgtaagaaggtctgaggctgctagcgttgtacccgtattggttggcagggcgcaacgcctggctgggtaataggaatgatcacaccgtaccattgtaaaggccgtgagaattcaaaaaggcagaaatgagcataagcagacggcgttatcgttgtaacctgattgactggacaaccttttgggatcctgagtgacgactgacttggcgtaaacaggtcgagtcggtcaacctctctgtgcaccttgaggtcaagcagaagaccagctgaagaggtgcacatctatacagcaggttcttcctctctccatgagcccgagcaattgcgatacacctgtcatgtgggcagttacatcaggcacggcatatgaggagaccagtcgggaagcatgctagtaggcaaactcgtagcagatctcgatcgaaccatgtgctcatcctagccgactatgttacacaaatacggcaacagatgtcgggggtgcgcacatcgccggtctttgaaccgcacgtcacgttcctcctctcacaccgaccatgatgagcctgtcatgacatcaagctcatgcgtgtttgggatcgctagcctcgccaatttggtcggccagagcgccaagcgatcttctatgtcacggtttcgttatgcgtatcactcttgtagatcgctccaagcagcacctcctcgctcgcaagcaacacccacgcatccacttggccctcgagtaagagtggctatacgagcgaaacacgagcgaaacacgagcgaaaccttgtcgatcgacgacttttcgcgcgccgccctctggaaaaaggcattcgagaggcaacaatgccgctcgtgtccgccataccgatcgttgaggttcaagagaaacgtttaaacacatgaagtgactcgagcgatgagaatatggtcggccgtatgtggcctggcctgtcgttgtttacctatatataatgcctcaaaaatggacgggaaagaggggtagcctacttgctcagacatttctctgccctttctctagacagcgtttgcttctaatcgacacctagccttgcacacaattctatctcgaatcaggctgcgttcatgacttcctaccaaacgaaatcccaacctcacgcagggtccgatcagtccatcccacttggatcgatggctagcccggcgtcgacttccctgggccgtgccgcatccgagctgacgttccagcaacatgagacggttacccgcctggctaggcagctaacctcacaatcattgcaacccatctgtgcgagccccgagcccatcgatcaacaagctctggattcaagggaaagcctcgacagcctggacttgttcaatgcgaaaaaggacagcaagctcgaccctttctcgcccaactttgactctatgggatgggcgaggcgaattatggacatttacctcggagacgccgaaaagaaccccttgcggtccatgggcgtgtcgttcaagaacctcgatgtctacgggtacggaagcgattccgagtatcaacctacggttggcaatatcgccttgtcacttgcgaatcagatcaggcagctcgtaagcagcaacaagcgcaaggtctccgtcctcaacagctttgatgggttgctagaagcgggagagatgttgatagtcctcggacccccgggaaggtgagacctggccccgcgtcctttcgcttctgaaacgaaacgcggctaaacctccaataccgcgtcgtccagcggctgttctacctttttaaaaaccttgtccggggagatgaacggtattcataggtcggacgagtcgatactcaactaccaaggtttgtcatctgaccctggccagtcctcacgccgtatactcacgctacgtcttgaaccgatatataccaggcatctcgcccgaggtcatgcatcgagtataccggcaagtctgatacgacgccgtctggagacatgcgccttcacgctgactgcgcgacatggacgtaggggggaagcgatctattgtgccgagaatgagaacaactttgcctcgttgaccgtcggcgataccttgcggtttgcggccgagagccgatgcgtgagcccgaaatccctccttgagcacttggagagatggtccgctgatgagcagggcctcaactagcccaagaaccctccgggtggggtaggtcgggaagtttttgcgttgcacatgcgcaacgtgatcatggcactactggggatcacccacacggtggacactagggtcggttccgacgtcatccgtgcgtgcaagtttccggtcccacgagcgtcagctaatgagctcacacgggtcgtggatcgatcgggcctgtataggaggcgtttcaggtggagagtgagtctgttctactgcgaatgttttcaatcggcttcattgttgatgaaccgagctccatggcagacgtaagcgggtttcgatcgccgaagtgctattggccgactcgccgctacagtgttgggacaacagcactcgaggtctcgatagcgcgaccgcggtcgagttttgtaatacgctgcgcatggcatcggatctggcgaaagtcactaccgcggtggccatttaccaagcacctcaaagtgcatatgacgtatgttcagcattggctgtggcatcctgtgcaccgaatcctgaccacatgcacaaatagatgttcgacaaggtcacggtcatttatgaatccgagcagatcttctttggacgaatcaccgacgccaagaggtactttgaaacgatgggatacgaatgcaaacctgggcaatccatgccggactttcttacgtccctgacgaacgcgtccgagcgatgtgctcgttccggttttgaggacaaggtcccccggagccccgcagaatttgctcaatactggaaacagagttcggaatactctgaattgacggtcgaaatcgatcaatacaacgcgcgctatcaatttggtactggcgcttgcgatgccttttcggtatcgcgccgggctcagcaggccaagggccagtgagtgtatcaggatccgcaagaatcagcgtttgcatactgagtcgccatcatttgatagacgctcaggctcgccttacatgctgacatacacgcagcaggtacggctctgtctgcgccggagcttttggcgaatcgcagccgaacctgcgcaaccagtgtttgagctcagcgccaacatcgtgatggcgctagcctttgcgagcgtcttctataatttgtcgagcgtgcgtcactcggcaacggcagacggtgcgtatgagatctgatgcgcccgactttctgcaggataccgccagtttccagcagcgggctggagtcatctttctcgccatgataatggccgcattcgcctcggccttggaggtgagttcgggcctccgatataaggatgacgatcgaagccgacgggaacgcttgcagatcatgaccctgtacgaccagcggtccatcgtcgagaagcatacccgctacgcttttattcacccctcggctgaagcttgggcgtcactgatcagcagtcttccttacaagatcatcaatgccctgcttacaggtctcgtgtactactttatggccaacttgaaccgacaagccggaaactttttcttttttctcctcctcacctttgtcgcgaccatgaccatgagcctgtttttccgaagcgtctcggcgctgtctcggtcgatggtacaagcgatggttccagcaggtctcttgatcgtcgcgatgacgaccttttccggtgagcacatgcggtcgtcgaaatacgtagaagcccgtttccaatcgagatccttgcccattattaacaggtttcgtcattccgtacaacaacatgcgcggatggtcgaaatggatgtgagttatcagtctatttgcccctacctatgacgagattgacaggcatgggcggactgcagtttctggatcaatccgttctcgtaggtccagatctgttgaatctcatcgggaaatatactcaaggacccccgttttccagctacgcgtacgaagcccttttgatcaacgagttttcaggacggtacttcgcatgtaccaacctcgtcccgtccggtcccgggtatcccgacaccccgttgcaattcaagagttgttcaacggtagggtcgttggcaggacacagcttggtatctggagacgactttatcaaggctgcgtataattacgaagcgagccacaaatggaggcaagtcgagtacaatcgagccatcttccgcatccattaattttggcccttttcgtttctagaaatgtcggtattctgtttgcctttatattcggtttgcttgccgtctatttagtggcttccgagcttatcaccgccaaaaagagcaaaggcgaggtcctggtgtggcccagagggcgatcgagcgatgtagccacgtcccgaaatcacgacgtcgagcacggcgctaaacaaatgccgccgggaggaccaagatctgcggcaagtcaaactaccgctctcgcaagccttcctacgcaggcggcattttcttggaccgatatctgctacgacgttcagatcaaaggaggcgaacgtcggatcctcgaccacgtcaacggctgggtgaaaccaggtcagcttacggcccttatgggcgttagcggggctggcaagacgacactactggaccttttggcaaccaggatcactatgggagtggtaacgggtgaaacgcttgtgaacgggcagccgactgatgcctcgtttcagcgaaaaaccggatacgtccaacaacaggtgggtttccaatgtacaagcggtaatgcacaagcgggagtggcggaaaagaactgacatcggttcatcgcggatctaggatttacatctcccttccagcacggtgcgagaagctttagctttcagcgccctcctccgccagccggcctcagtctcgcgtcaggaaaaattggcctatgtcgaagaggttctggaactgctagaaatggctgcctatgccgatgccgtagttggcgtccctggagaaggtgtgtagcctgcaaattaagccagaaaatgccaaagctgagatgatgcgtcgcaggactcaatgtcgagcagcgcaaacgtctgacgatcggtgtcgagctggcagccaagccagatctgttgctgttccttgacgagcctacctcaggtaagtgtaacccctaccagaaagacgaaggccggatactgacatcgtttataaacaaggcctggactctcagacaagttggtccatctgctctctgttgacgaaactcagccagcgcggccaggcaatcttgtgcacggaaagttgaagccattggttgagggtaatgtccaccgattgatcgttcacctttacctatcggtagattcatcaacctagcgctcagctgtttgagcgcttcgaccgactactgttcctcgccaagggaggccggaccgtttattttggcgaagtaggaaaaggcagcaagacgctggtcgactatttcgtgcgaaacggagctcatccttgtcctgaagcggcaaatccggccgaatggatgttacaagttatcggagccgcaccaggtcacaagactgaaatcaattggcccgacgtgtggcgagagagcgacgagaagcgtcgagtcaagatggaactcgagacgatgaaggccaactcccgaactgcgaaaacggagaatgaggctgtacagcaggaatttgcgtcgacgtaccaaacgcaattgatcgaagtcattaagcgtgtcgcacaattctactggagaaaccccacctacatatattccaagctcatcctggtcgtcggaacggcaagtccagtagaccctctcggagcgatgtttgaggctcacgcgaggtttcttgcccccagggtctcttcattggtctttgctttttcaaaaccgataccacgagccaacaagagctgctgaaccaagtcttaagcatattcgtcctcttttctagtgagcagtggcatggccatgttttgcttgccgcacacggcatggctggctgaggtcttgacgtgggcgacagtctttggtcagatcgtcgaacaggtccttcccgaattcgtctcccaacgctcgctatatgaagtccgcgagcggcctagcaagacgtactcctggaccgtgttcctgatcgcaaacatcatcgtcgagagctgcgtcaacatgctcgttgctatccctctatttgtcgtctggtattaccctatcgggttgaacgaaaacgccagcctcaccgggacgacgcacgaacgcgcaggcttgatgttgcttttcatcgtccagttcatggtctttgccgggaccttggcattcttggttatcgccgcggtcgacttgcccgaaatcggaggcgcgatactgaacctcctcttcctcttgtctctggttttctgcgggtacgttcacgctcatctgtggtcgcatttgggcacgctagctgatcgctgatctacatctacgtcacactgaaatcatcagcgtgctcgctcccaaagacacccttccagggttctggaaattcatgtaccgcgtctccccgttctcctacctggctgaagggatgctcgtcactggcctagccggagtccctgtgacttgctctgatcaagagatagtccggatcgtcgcccctcccggtcagacgtgtgcgggatacctcgcagactatatccgtatctctgggggtcaccttatcccgaatgcgactgttgaatcggaggcctgccttttctgccctctagacgcgtcggacgcctttttggcgcggtacagcatgtcatactctcatcgatggagggattttgggatcgtatttgcatacatcgttttcaatgttatcgcaacctttgggctttatcgctggttccgtatggtgagtcttcggtcttgtaaggtcatcttgacaccggcgccatactgactaccatcatatgttgtcgttatctcttggtcagccctgaaggaagaacaaggcggccgttaaagcctagctcacgatgcatcgagagtcggcaggaccaggggatctgggtgcgctgtagctgccgccagagccgaggagcgtgtggagaggtcgtcaaatggcccagaaagaagtgaactagaccgtgtatcaggcaaacggatcgcgatagataataaataccagattcaaaatgacctcgaaagaagtacgcaatcgttcgtctggctcctcggaaaggtcgctctgattcaccatgacagtcccagcaaccggaaaggcaaagtgagaccactcgaatatcaccggattcgcgtgattgtgaaaagggttccaagcctcgtgccacgacgattgggctgggtgtaccatttagcagatcgctcactgccacagcctcgtaagcgacaagatcggcttggctaatccccaatactatagacgaaacctcgtcagctttgatataattcgaccctcctcgatttcgactcaccaggtccccttgccaactggaccaggctgcactcgcggcaatggtcgcggtgatcgccccgacggtgacgatcgtcagggctgagctttcgggtttgacgacaatgtctacagctttgccgctggcagcatcgatcgttctggccaaccaatcgtcccagaggatggtttgtgtagattcggccagacggactagaagcgaaggggcgtcactgtgtgtcagagagggggttgggaacaaggatttttttgcagggcttacatccggaaaccgaattcggtacgctcaacaatccgttcccattgactcgccaccagttatcgcacgctcccgatttcatgactgttccagcgagacctctttgcaattcttcattgtgcctctcaaatgcatccatcttgggctgaagcgaggtgatcccatattggatcatctgtcacaaagaaggcttcaaatttggcgttcagaggcgtcagctatcgcagaactcacacccgatataagcttggcattatatactgccttgcaaccgatcgtatatccccaacttccggcgattgcgttgggacctagaatgatgaaataattgggaaactaggtcgctcatgttaggtcgcatcgtcaatctccctcgtatctgaaaacttacttgcggtacagacgttcccatgtacgcctttggcccgccatgctccttccagtaagcttgcaattcttgacccatctcccctgttagtccgacgttcagtccgaccccatgctccgcgacgtttgatccctgatggacatgaatgaggatgtcagcgccgatggtctgcaagcgatccgacgtcccgagccactcacggtcgcccagatgatgacatcaagctcgtgctcctttccatcgcccgtgaagaggccattgctcgtcactctttcgatcggatgatttaccaaatcgacattggcgcgatgtagcgaatctagccatccggcatcgaacgcaacgcgcttgcaaccgagagggtacttgggtgtcaaagccctgtgtctcgaaagtcagccccacgttctcgcttccagccgattcgaaattcgacttactcgagatactcggctggcgccttttctgccaggtacttcagtagttcgatttcaaggggcgaaggatgctccttggattctttcttcgctcgccaccggtcgttgctctgcaagcgaatcgagtcagctttttcatcatggaaaagacgcccctacagagttcacctcgagaaagagaccgaacctgtacagccgctggaccaggggtaaatatcggaacgcaaaccgggtggcagagttataaggcgtgttgactaaatgggaacagattcagcgcttctcgagatcatggcccagccgataaacccctacctttcggcacgaaatatcctccgcttcggataaagtgggtcaattgcacccctggaatggctgcaacccctggctatttgtaacagtctcaccgtcagtacgatagcgcccccgcactgaagacagtactgacaacaagctgaatgcccgagctcccgttgcccacgactgcgacgcgcttgttgcgcagatcgatgctatcatcccaatgcaggttatgaaactgaacaccttgaaagtccttttgtccgggtatctttggtttagtcggtgtagacaacggtccgttggctgagatgatgacgttggcgcggtaatcaaagcctgacccgtctttgcgtcgaaagtgtatctcgtgtgtttgttccgtagcgacccagtcagagccaacgtactcggtgttcaacacgacgtcttgtcgcaagccgtgcttgtcgactagcgattcccaataagctagcacctcgggttgttcggcaaaaagcgtcgtccaatcgctctttagatcggaaaacaacgagtagagatgaatcggcacatcgacgccggcaccgggccacttggcgtctcgccatactccacctagcgaggacctcttctcgaatagctgtgaggacgattttgctggtaagaaccgcactggacagggaaaagtattttgagactcaccttgatgtcgaccttgctgcccaactgacgcctgagcgtgaccgcttgggctatcccggaaattcctccgccgatgatggccaccttgaattgcgcttgttgtcggaccattatgaaagaatctcgctgcatctgcgcatcatcaccttggcgactgccttgaaggggcacatcagcaggattcgtcgaatctacacataagtaactctccacattaggccgggctcatgcctaatcgccaaccatgtgtgaatgtgacgatggcggattcaaatggcgttcacttggaatgtcgtgctcgctatagcgcccaagttgacacagagtcatcaaccgagcacgtcatgcgggcgacataccgcgtcgcaacgcgttcattgtgccaccacttgtttatttttgctatgtgacattcttgtcatttgccttgcttttctacaatcccgatcacgtcgcagccaccttgactcgcttgtcaacgccgttaactgggccatcgccattcagcgccggcgccggcctcttcagtgacttttcgttgacatcgccgttgacacccgtcctcttgataacgccgccaccaggctcgagctccgggccatgttcgtcacccacattccacttgaacgcactcccatagtgatcattcggcagtctcgtccgacctatcccgtaaatcccttctcgggccgtgagatgcttgccatgagctggctcggggtaatccaaccagtgtacgccgcgacgttggagttcgggaaccagatgctttacaatgtcttcaaacgtgccaggggtaatggcgtagcagagatctgtgtaattattcgcctaggtccgttagctcgtcgacctggacccttacacgatcgatactcactgaaaccgtcgatatcagcaccgtcgatccacgactgcatctcgtctgctacctgagtcggtgtcccgacgacgacgggtcccattccacccaacttgaaatgatctgctagtgtgtcggcattccagagcgagacctcggggtataacgcagcatagccccgagctactccggcaacaggaggtgtgccgtgctgcctaagatcttgcgtcccgtcgtagattgagaggtcgtgcccgatccagctgagccgacaagtctgatatcagctcttggtcgttcggacgactcgcactcacagccacgcgctgctcaccctccgaacaacactttggcgccttctcgactggccagcgcgttgtactcgtctcgtttagctcgggccttttcctcggtctcgtccacgatgaccgtcaacttgaccagcaccttgacggcaaacgggtcccgaccttcttgcttgagagccagacgtaatgcgtcgacctgcgagcgaatctgtcggaagcatatcgaaacgtcagcgaggatcatcatcgctcgaatactgccaggatactcacctttttcacgctgggcccactcatgaacacggcctcggcgtgtctcgctccaaacttgatacccgccgtgctggtacccgcttgatacaacaggggcactttctgaatactaggctcgactggtagatagcgggcgtaatacaatgtcagacggctcacgctccctcgtccaccccgcaagacctaccgaaatgaggaccttccacgtcgaaaaactcgccgtgatgatgaatcttgcgaattctctttggatcagagtaggtgtctgtaacgacgtcgagcacgaccgcatcgtctcgccaagaactttcccacagtttgtacagaacgctgcgagccactgcggtcagctggagccggactccggatgcagtcagacgacacggtgacgtactccatgtactcctctgccctacgatacctctcgtcgtgctccatctggtgcgtcaagccaaagtttctcgctgccgagtccaggtacgatgtcactatgttaaaagcgactcgcccttttgtcaaatgatcgagcgtagagaaccgcctagcaaggacataaggagcgtctacatgtatcgtgggtcagtatgcgtgcgagccataggatcaagactgcaggcagcgtaccataagtcacgctgtgagtgatcccaaacgctaaatgcgtggtcacggcggcagctgcagaaaccatcaaggtcgggtcgtccactccccactgcgcgccggtgcgagcagctacgaggcaagcgctacggatgagcaggacgtcccgtcgtccacgcctggttttggtccgactcaccgccatcgatgctgctgccgtagacatcatacgctcccagcgtatcggccacactgcacaacgagagaaggtcaaccagtagcaattgacccgcggtcgacattgcactcacaacaagccgttgaatttacccttttcgagaatcttggcgacagaggtccagtacctgcgagcttatcggcgtcagcacgatacggctctaccggtgcgacttggtgctacgcactcgatatcgtggtagctcgcactcctatcatccttgtgcttccacaatcccggactctgatgccctgcacagctcatatcaaaggcgttcaagatccatcgtcttgaagcttggtccaagggtctgattggaatagcattgatgtcggtgatgccattgagcgaggtggatgttccgaacgattgcatgatgtggcctcgacgtgtgcgcgatccggctcttctagctggtcaggtaggcgatctgagattctgtcagagactcgacatgacggcagctgactgttctggcctccttcagggagatgccccttttctagttctcgatggccaccctagaccatcgccgaacctcgtttcgccgatggcctgatacctagccactcgccctgtgctcctattcatttccgattgtcgtatcagttgctagcagttgacatatggcgtcatgcagtgtacgactagctgcttgctgctcgagttgtgtgtgaacggatcgacttgtcagaacgagtcgaagttgagatgtcgccatcgccggacgttggggagctagttgatgtcagacgacgtttggaggaatggcgtgatagccggccgggtcgatcgggtttgagcgagagctacgattacacacaacatcatatcgtacctcgccatgtgtacgtacactccgccacagcttagagtcctcatgatctcatattctgctatcagacttcggtcgaggtgtttctcgaacctgcatggcgatcgaaacgagttgagcaaaatgctctcgtgatcccgtcgcagcccctccgaaacacgcattctggtggcaacctttggctgaacaacatgacacgacccgccacggaacccatccgtgtcaccatcgttggaggaggactgtccggaatctcgcaagcccttcaattgcgccgtcaattgggctcggatgtggacctaaccatcatcgaaaaagaagacgcggcgggaggcacctggctcaactcgacatggcccggagccggtgtcgacattcccattcacctgtacagcttgtactctgatcccaagaatgattgggaccatgtctttgccgatcagcagcaggtcttggcttatctgaacgagtgcatcgacaagaacggtacgtccaactcgacacgaagctagaatcgccgaaaacaccccctgatgccggtcgagtcggttcgtctagaactccttgatagctttcggttcaacacggaatacgtctcttcagtctggaactcgtcaacgcagacccacgttttgacgctacgatccgtgtcgagcgaccagacctacacacacacgaccgacgtcttgatctcggccaatggcccgctctctacgcctctgatcccaaagatccccggtctcgacaggttccagggaatcgcattccacaacctacattggcgacgcaatcccttcgactacacaaacaaacgagtagccatcatcggaaacggtagctcgggtattcaactgcttcccggtatcgccaatacccccggcgtccaactcgtgcagtacatccggagtggtggttactatttccccaagaacaacgttcccatctcctcctggcgaaaatggatgtactcgtggatccctggagctcgtctttaccaccgctatcagctctttatcgcgcacaacgatcgatggaagacgagaaacgccgaggacgccgatgggcacgacgagaccgagcaagtcttgcttgactatcttcgcaagactgctccagccgactacctggacgcattgacgccccggtatcgtgagtcgcagatgcgtgcgcgagaacgaactggtgtaaccgacttttgccgacgctgtgttggtgatttttgcatagcccttggttgcaaacgaccggcatatgatgctggttggttggcctcgttgcacctgcccaacgtgtccctgaattcgggtggtatcaaagagatcaccgagacgaccatcattgatgttcaaggtaacaggttcgacccggacgtcatcatctttgccaccggatccgacgtcgctcggcatggcgtcggtctaaacatgggtctccatggcgaggacgacagggaattgcgggagttttggcgagaacttggcggccctcagagttaccgaggcctagccgtaccatctgtgagtccacgctgctctcgactgcaacgacaaatctaggctctgacctgggactctagttccccaattacttcatgactctcgggcccaacgcaatcgccggctcgtgggggtacaccatcggcaaccaaaccaccgtgatcgcccgtctggtcaaagaaatgtttgatctcggcatcggctcgctgcaacccgatcgtcgccattttgacattcacaacgccgagatacaagcccaacttgatagcagtactatgaacagcaaggcgtgttcgaattggtggaggatcggaggtcagggtcggttgtccgtaccgaatccgctcgacgccggtgagtaaagcagcagttgggcgcgcttgtaccgagtaggagctgactttgatcgtgtagtcggcttatggagaacgacgagaaaaaccgactggtctcactggatcgctctgtccaagccatccggtcaagaagaaaaatctatcgccaagcgaatggacgtcgaggcggaactcaaacgtcggcgatcgcaacaagtcgttcagggaacgcttttgttggcggcaatcggagggtccgcgttgtattttgcgaaaataggctggccattgtacctaggcccatcgttgtaggtggttatagatttgcacatacgtctgcgagtatgaagctcgagtttcgccgtctcgactttagggtgaatggctggtcggctttatcttatcaacgttcgcatcgtcaaagcaaaatttggaatcgttccgccactctgcgatcacactatatgccgaaacaactgccaaaccttcagacagcaacagaaatggcgttcggccaagagggatcgcaatgaatttccccatgttttgccatctttacatcgcccgtactttgcgtatacaacttgtgtgttctatcgtctactttcattctgcatccaagggacaagtctctcgctgatcattgacttgaattcctcccctcttttcgtgagcgctatccgggaacggcctcttccaccctctctggctttcgggtgttgccaaccataaccgcaaaagatgtcggcgaggcgcaggaggggcatagtcggtgtatgcggttcgagcgtggaagacgtgagctacgcaattgaaagtgagatttttaggagtctgtggaagcggatcgctccttctgatcgtgcgacactcactgtccgcaacgaattggatgtcgccgaccttgagcaccatatgaagtgacagccgctgcgccgtttgctcgaacacgtcgatggcctcgatctgcttcttcgagagagccggaatcagaccggcctcgacgtgtcgtccgatggatcgaacgaaatagggatcgtagtgggacaagaccttgccatcatgaaagtaaaagacctgaaaatagcgcgaggtctggtaagctgacgggtcgcgaagcacttgtgtgctttccggctcactgctttttggacccatccgttctggccttcagatacctcgcccttgcggtcaaagtaccaaatgggttgggcgaggagctctgcaacatctggcctctccgcttgcaaggtgttccacaggttgtgtgcagaaacgacatccgattcgccgccttccttggccttatggagacacaggagtcctacaatatccgctgcgtcggtgtggaaaaattgtcgagcggcggttctatcaggtgaaaggtctagtgaacaatcgtacagtctgcaccgccagcctgactacgtacgagtaaatcctgaccctgtcaatctgtgtagggtcgttaccaagatccttgacgtgtccgaggacgtgtcctttcccattttgactcaaagtgttgccaaagtgtgtcccgatagccaagtacagagcagcagacttttcgacctcccagctctcgactggcaagccttcgattaggataaagccttgaccatccacaatctgcgaccgaatgtcggcaaggaatccggcaatctcatcagatagagggaaagaatcctacgactcgcccgtcgatttcagctgacagcacacacactcgaatcgcaatctaagctcaccctgctgattgaagtgattggcttgccgctcgccttgaatcggtcgtatgcatgttccaggtcggcaatctgcccgtctgaccactgcttcttccacagatccggctttgatcggaaatcgttcgctttccataccgttggcccggtaatcttgagagggaaattgctgtaaggctgaacgaggtcgaacaagacgtcgctttgaccttgagtgaggggacggggagtcgcaatgggcatggtgagaccggatgacaagcgcgcgaggttgctgagggtggtattctgctcgatggcacctagtcagacccgcgagttagcttacaatagcacttatataagcttctgctggccgatcatgttgcactcgtccatcggccaagacgtgatcgttgtcgactcgctcatgtgctcgctctcggtttcaccatcgccctgtcgtgatcgcgcgcttgttttgcgccaccggaatcgcaaatgaatgatggcgtgatccgtcgactgagacatcggcgttgaagggttttggccgtttgaccaatcttggtccctgctatcggtcaacacgatgacctctacacgatctcaaattcatcgctcaagtacggtttcatgctgacaagtcatgaactggtcgcatcgttcttctcgcgccatgttatggagcagacaccagtacgacgcatactcgtactgctcttccttgctctccaaacgatgctaacagctatctcgtatccactcataatctttcaacatctggccatctaaaacactcacacgcgatctacaaccatgagtttaccagccatccaacgagctgtcttgacgagacttgcggagccggaaaatcgagcttggagcctcgatgtagcgtatccagtatctttgccttccgcaggtcaggttttggtcaaggtatcgcacgccggcttgaaccccttcgactggcagtccgtagaatacaagtttgggatcaccaaagatcccaaggtgattggacgcgatggagctggtgtagttgtcagagtcgggacagaggttgaccgctttcgtgaaggagacagagtaagagtgggctagacggcaaacatttgatccaagctgatagaaaaatctatcgatcaggtctggttttgcgccaattctgccggaaccggaaccggtgctttccaagagtactctttgcacgatcaaggagagctcgggcatactcctaacaatatctcggatacacaagcctcgactcttggaaccggcctgattacagcgggggtagcaatctttcgtacattaggcctgaagttcgaaacgctggagcagagagaaagagaacagactcgcagcgaagaccgtccctggatcctcatctggggaggagccggtatcacgggggtctatctgatccagctggcccaattgctcggattcaagatcgtctgtgcggcttcccccgtgaatcacgcatacgtccgctctctgggagccgatgtcgtgttggatcgatggctcggttccaaagagcttgttgagcaaatcagggaggctacaaacgacaatgtgagtgagggaattagaaagaggccgtttacgcgcaagaatctcaatccatttcaccctatgtagctatcaatcgctatcgacaatgtgggagcgactactgctgcactctgctacaaagtcatcgaaggctcttcctcttggcagaaggaacggggtgagcttccaactcgagagcccgctcgcctcgttgctctcgctgggttccccaaggcgatcaaagccgacccagatgcgacccgggtagtggaactaccccggatcagcttctcgacgaccttttatggccatccagacttttccgtacgccttctcgatgcgtaccagcggcttctatcagatggcagtatccatccggcacgttacaaactggtagctggtggtctgagcggcgtggagtcgggattagcacagctcaaagccggcaagggtatcggcggattcaaattgatcgtctcgatagaagagggcgccgccaagacgcccactggaccagtcgtgcgggaattgaaaaagcgcaagtcagcccatgtggaagtagaagagctggttgtcaaaaggcaacgtctcacagcatgaaatgtaacatttgtaaatgaagcctcgaagctgtcattgatcgatagagccgtaccccatcctgaaaaaacgctggatctcatagtccgcattaagcaaacgcatatcacatgtgttctcgagctgaccgaattcaaaatcgaccttgcgggtcgacaagacagacagatgatcaatgaggcagtcatgcaattcgatccagctcgtgcttcgtctagtttaagctctttatatctatcacacacattcatggggatcctccgagcaaacagtcacccggtcaacttgtactttccagcttcctgagaccagcctactatcaaacctctgaagtgctcatgatttctcacttggcaagacaggctctgaatgtccttccaatatgaccgcagcttctgcctcgatggccgtcctgccaaagtactccacgccgatcttccggatcacaaaccaagccgggatgacggaaattccccacaagccaaagttgatcgcggatgatccgaccgtacccagactttcgatggcattcgtaccgtaagccaccgcttgagcctattcattgccgagcggtcagcatgcggtgcaaggacagcgtctttccatgcacttacggcagactctgtagcacggagcagaccggcgatcctgatgatatcgacaggcttttgaacgactgttgaggtagacataatgagcggtctgtaccaggtcatctgctggtggtggttgctcacggttcccgaccaagaagtacaggtacatgtagttgagttgaaaaccaacaacaataaagagatagagggcaaaccctcgaccaaacccagcgtcagcccaatccagaagcgtttcctgtcgtttgaactgcgactgcgatagatctatctctcagcccctgatcgtatgctataaccaaaattctgaacggacttgaataatggtcgaccagatccaccaagctccttgaagtgtcatgataccaccaaaggcaagtcgagcgcgcgctttgagggagatgtttcttcggtccaagaaggcctgtaataagacaccaatcttcagcttcaggactcacccggcaggacacgaccaaggcctaccccaagcaagttgccagcaatcatcgacatgatggctcccagaaaagagccgagcgcgcgagctcgcacgctaaagtacagcgttagataggtaccagtgaagctttcgttgaagacggcttgacagatcaatggcacgatcaacaggaactaccgagagaataaccgttgagttgtctgtttgtcgcggttataggacgtctactcacccgcttgctagcaaagagcttgagagtctccttgatctcctgtccaataggggtatcgacctggagcttgactttcaacccatccgttcgttgtactttattcggagccggtaacaaaagtgcgaccgcgggtccgatagcttgaatggcgataaaggcaaggtagacctttgggttgacgctccctcgctggctgttctgggagttgatacccaggctgaccaagacccaatcagtgtcaaatttacattgaaaagaagtcgttgactcacttgatggctccgcctagaacgggcccggcaactctgaaggtcatccaccaaccaagatgacgaccttggttcttcggctcaggataagacaaagctacagcagcctcaacctgaatttgagagtgtcggtttgggaattcaggaaccgcgccccgatcgcactcacggcccaaaagactccagcagatatcccacaaagagcggctccgacgaggacaaaccatttcgtcccgaacgactataagtgtgaggtatcggttagtctgcgtgcaatgtctgggatggatgcgagaagataccgacgatgttgcagtaaagcgcggcggcataaggtgcgtacccagctgctccgaagaagagcgaccatttgactcctagaaatcgaattagcaccggtgtcaaggtggcggtgacgaccatgagtccgaaagtcagggcattggccccgttgactagccaaggcgattgtgcgcctcctgctccgagggaattcatcgcccctgtgtcgaaccggattagcatcctgactgtatctgcttggtcgtaatctcgtcgctcaccccaaatccccggagcagcaaagttgcaaagacccaagatggtggcggcgaagaaagttgttcgatagaagacgcgcttctccggagtctgatcggtgggtaatcgctcgggttcgtcaagtcgtgcatccttgcttgacacactggctgatgagggacttggagaagacatggtgcaaagtcggactctgatgataggttgggtcaagacggataattcgtgctcggtacggtcgggctgctcgagagaaccgcatctatttatgttgaaccaggaggaagcctcgaaaggctttgccttgtgttcagctctagatttcgtgacttgtcaactgaatgccgtgacaggtattcaccgtgattcactcggatgtgatccaagtcgtttgtccgagcatgtttcaaagttgtcctggcggaaatcacgcgagtgctgcggggtgggtcgcgtcattccgagtaacgagtagcgccagcacggaagcacgccattgcagaatgagctcaatatctatcacacttgttagcagcgcctgatgggataaactaccgactggtatcagatgcgtgcctgataagaaggatgagcgattcgccaacgccgaaggatcacgccttgttggcgatgggcaaggttcaactcagacagcgagacgcgattgggccaaaccgggatgtatacccgcagcttcgataacgtcactgttgaccttcaaaatcttcaaggctggcctcgttccaggcggcaatctagcaaagtgacacctctggacactctccttaaccttgccagagcgattttgagcattgctcgatcgtcattcatcatctatacaacccgaacccgtgatacatccgactgagccgctctgacaactttctacttggatccgagcgacctgaacctctcctcgatgggcttgaactgcttctcgccggcacctccttcggggtgaccgaagacgagttgggtgccgagtttccagtcggccggaacgttaaaggtatcctgaacctgcttgaagatgaggttgccatagtgctgagattacgatgaaaggaggatcagttactcgtcgccagcatacgaccaggtcacgttctggctcacctgcaaattggcaccgagaccctcgagctcgagcgcggtccagatgatgtaagccaagataccgtgagattgcgaggcctacgggacgagacaacgtggcggtcagtcacaccattcccgacccatccatggctgacgtgcagactcacccaaggagcaaagtgctcagagtagttggggaaatcggcctcttgctttcgaacggtaggctcatcgtcaaagatcaaaacggtccccttgctagccttgaacccggcgatccttccagcgcttcccttttcgtagccttcttcaccgagaatggtcttcaaggcgtccttgacaatatcccaaagcttgtcgtgctcgtcgccaaagaggatgacagctcggccgatctggtagttgctgagggcgcgcgcgcgaataaggggtggccgctgattagctcgcgggatgatgacgaccgtgttctcgagacaaaggccatgacctacaacgaggtaggagtatgcaagatggcctccttgacaatatgctcaatccttgaatcggggactgatccgcccttggtgagctggtagagacttcgcctggccttgacagcgtcgaggaaaacgtcggtggtttgagaagacatgggggagagttgacgctacggctgatttgaatgcagatggatgtgtgtgaagtactgtaggagtatggggctacctttgagcctgtcgcctcgccctcgaacccttccggtatatatacttgccaactttgacgtgttgctcaatggcgtgacgaagggagctcggtggctatccggatgacagaccttcgcgtttgtcaaccgatctgactaaaaaagggatctcatggttatcaatcgttcccacaggcatcagcaagttgatctcggcgagtgatcgatcattcccatcaatgcaaaacgtactctgacccctcaaatcatgcttccactttctgactaaaatgtaaaccagcagtcccagtagcggtcggtcgatcctttctcgctcgacttcacaagctgcgagatatcagccctgccgagtcggcgacttttcggctcggaatggtcaagtccgaaaagtccgattagattccggtgcttaaccaacacaaacacatcatcaatctagaatctgcaacagcgcaacagcatcatatacctacagctatcattggacacgaatacatttcacaggcttcaaccgaggcgacaaaatctgggcggactgacgcacggactctgtgtgctacttgccccttttcctttgcctttaaccagctgccttagcgttcccttacctctggaacaatcgtgccggcctcacaaaggcaaaacgggcgccagatcggaccacagtctggcatgccccaagataaagacgcgatcatcagtcccaacctcgcgcaattcatccagagggacatggcgcatcgcactcactcgcatcgccccaagaacccacgatccatctccctgaccccgtttgccggactcagcgtcgcagtgacgttccaaacaaagttggtgggagcgttgtcgtcataagccttccagtcgctcgcaagaggtttgtctgacggcgcgtgaccagtgtcagcacaatttatcctcaacgaaaatagtgaacggcgcttacaggttgtgatgaacgcgtttaggttatcggtatacgcctggatctctccggacaagctggggtaaagagctagtgcttgataggctgtacgtgccggtcagtagcttcaggtcagcgcaatatctggccggcttggcgattgagggaatagtccactcttaccgttccaagagaacgcaaggctggaacgataattgaacacggtgagacacgattgagactctgttttgatgtgggttacaactcactccccgccgtgaacgccaaatccgggcacaacaaagtagctctgcaacaacatcaatcgggtgagaggtcgagctgaatgcggacgatcggccctactcacgatataggactgatcctggaacgcccttgccatccaaacggactgacatccgaaagtgccgtcgctgtagctacaaaatgaacaggtgtcgattcagtctcaaccgagtcgtctaacaggtgacccaaacatacagcttttcggtagcgacctgtaccgacccaaacgtctgggcgtcatagacgtccaacagttgagcctgagcctccgagtcgagctgcggtttggaccgattcaagtactgcgcctgtcgatctagactctggccgatgtcctttggcacaaagctgttgcctccaaagacgatgccctaacgtcctattcggctcagcacgacgcccacgcagaaggtcatggtgacacccacctcgttgaagttccgagagacccagaggtgctccccgttgagcttgcctcgcctcagaatttcaagtggtcgatcggtaatgactgaaggtgctccgtcagtctcgagacatcgagtcacattgcgagatgacaactcacaaactccatcgatgacggggatcgtcaagaaatcgctgcgtagcgaatcgccgtcagcatcagaagtgtcatgtcgaccaggctcacaccgacctacccaggttcttctcggttgatgacgacctgagcgttggtggccaggtcagcagcatcggcctgcctcaagcactcgagcgtgtcgtttgaggcagcacagtcgacagagtcgacaagggattgatagatcgactgtcatcctgcaagtgtcagcttccggcgccctcgtgaccgtgctgtctccacgtccaccaacctgagggaccgtatcattgtagtagtactgaggaggttcgaatgggctgctagcgatggccccggcaaacaagggaggctgtgtgtcccctccgttcgcgacgatctaaaaagacaccgattcagcgtctttctagccgtaccgacccactgcccatactcacatgttgcaagacgctacccgctccggccgactctccataaagggtgacccgctctcgatctcctccaaactgggtcagaaatgatgtcaatcgccttgttcttagcgacccctgcaacgctcgacctaccttgctaatatgctcttgaacccattgcaaagctgcctgttgatcgactaatcacaactcatcctcagtacgcatcccttgacggtctaacagcgggacctacgaatcccggcgttcaaagctcctccgtccttgacttcttgtccagcgaggaaaccgaacactccgagcctgtagttgattgtcacggtgatgtaatccgagccgggtcgggtgtaaaggtaagaagctggaaacgaattgaggcgtgaggacgattctgagcaggctgtctggatgtgacctacgatcgaaagtgttgctcgcacccaaggtataactgaaaaggcatcatgaggtttagctcggagccgtgccactggtccgcacccctctcgagctcacccgcctccatggatccagaccatgacgggcaacaacccctctccccggtcagccggtgcaaagatgttcaggaagagacaatcttcagaggaacccgtcagccccgcttgggccgccgtgagagctgcggttgcgttgggatacatggacccgacgccttgctggaagcatcgagagccgtacgccgtggcatcctgcacgccttgaacggggagaggttgagcaggagcaccgaatcgaagttgacctgcgtcgaaccgccatacgcgacgataggtcaatcgagcacttggccggacgacggtgacggttcgactcaccgacaggaggagcgacataccggatccccttgaacgactcgatattagtcgtcgtgttgacggcacctcggtaaacggcatatcccaagtcgaccgtcgagtcggtctgtcgtcgacctgcgggaatagcctccgaggtcgataccgccaggcccaacaggaggacgcaaagttgagcgattgattggggcatgtatgggaatgctgctaaggtcgagaacagaatctcaagatcagagtttgctgtcctttgacttctaccgtgaacgtcctctagctagaagctgctatatacctttcgtaccgtttccggaaccagccaaaaggtgtccccgatctcgacaacgaatgccgactcatcagggcttgacctttgatgccgtcggccgacatatccttcgatgatattgcggctggctacggcctgatcgcgaatgcctccgatccgttggcttggctaatagctggagatcatagtgccttgacttccgggacccgagactatggtctgcgtcggaatgactatcatatcgctcgcaggactctgcaagtggaggatatatcgagcaaaagcggactccggaggctaaaagcggccgatagtatgcgtgagtgatgggtggtaagacttgcttgccggtactatagcgagcccacgtctcgtctgcgggatgggcaagtgcaatgagctttgatgcaggggaaagtgggcggtccgtcatcccttgtcgcccaacactacctacggccgtgcgaacgctatgcggggatcctcacatgtggccaacccgacccatctgtcactcatgcccatagccatagccatcccattgccctgtgtgtggggacgcgttcaccatatctacatgatctaccgacctggaacagggatatagcatattttcgaacagagaccttgcgaccgcgaacaaggctaggggggagactgaaatggaaaacagaggcgtccggacaaaatttcaactggtagactgtgcaccgtaagaatttgtgaaggcgacgttttcgccagaatgctcggtgtttgtcggcaaatatatcagtactcccgaccgagtatatcagggtcatggaaggcactgctcattcgatctcaatttgtcgctataccgttgtgattgaaacgcgtttcgacgtggacgtttcaaacttgcgtttcagcaactgtcaaggggtaaatccagatctctcgcgtgtcaaagcatgaccgagacatcctttagtcaggttggaaatcagtctcgatgtgaggctcaatatccttcaacgtactctagaacccactcgctccacagaccgagtgtcaacctaggtctaccaccgaaagagaaggtgggacactgagatcttccgtagatggttgagaccggccttttcgaccgaatatagctacgacgtttcacgctaatggttcagcgtctagattgacgagaatggtgtcatttcgcaggctgcttctgcacggtcacagctgactgaacccaaactcaaaggaacgtcctgcccgtgttgagaccgtgagtacacatataaagggtacaggcccgtgccgcctgtttgccactgaatccgttttaacgaaccctttctcataatatcgacctactatcttgaacgacaagcctgatcctacaatttcaacacaccatgctgttttcttccatcctgatcccccttgtcgcgtctgtagtcgccgcttctcctgccaagcgacaagaatccgtcggtctcgacgccctcgccaagcgacacggcaagtacatcgggaccgccaccaacagcttcaacttgcaaggcagcaacttggggcaggcttaccttgagatcctccatcgagatttcaagggagccttgactgccgagaatgagggcaagtgggacgctatccacccggctccagaccagtacaactttgccggcatggacgcggtaagctatactccggtggtcttacttcccagaaacacctgatattgactgctgcgtgtgtattggcagatcgtcgcccaagctaggcaactcaacgccttcatgaggggtcatactttcgtctggcactcgcaagtatgtccttcacctagctgttacccctttccgcttggaaccgacctgattgtccctcttccagactccggcatacatcaaccagatgaccgatccagagcaactcaaggccgctctcaaggaccatgcggtcaacgtcgctgctcgatacaagaatgactggacctatctcgatgctgtcaatgaacgcaagtatccggctgcgttcggcttaagaaagccagaggaagctaaagccaaaccttgttctagccctcaacgaggacggtagcttgagggatagcgtatggcagcgtgtactgggcaacgactatcttgcaattgtggtgagtattgtctgaagcgagtcattgaatgaaccgcacagtagctgacatatcgaccttcagctcggcatcatccatgaagcagcgccgagcatcaagctctgcatcaacgactacaacattgagggagtcaatgccaagagcagggccatggccaacatcgcgaggggcttgctaaacaggggtgttcccttgcactgcatcggtaagaggcacgctcgtcgccgtcgatcgaccgatcatcagctcattcctatcgtgctgtactggtccaggcttcgaatcccacttcattgccggaagcgtgcctcaagaccttgccgcgagcatgaggcaattcaccgacctcggtcttgaagttcccctcaccgagctcgatgttcgtgtccgtgttgatgagaatgaccaagccacctcggcggatctcgctactcagtaagtcgatcatattctgagcaggtcctgggtcgcctctaagctcgcttttccactgcagggccgaggactaccgtaccgcagtccaagcttgtctagacaattctctatgccccggtatcaccgtgtgtgagtttgtccactctgaatcacccacatctcgacaccactaatgatcatcgcgcacgtcagggcaattctacgaccccgtctcttggattcccggtttgacccccggctggggcgcggcgaccccctttgacgacaacttcagcccaaagccggcttttaacgcgatagaagagacccttcagtagggcattctcagcgtcaaaatttgttagagagtcagagtagcttttgatattggctggttccgggccggttccgaggatcaggacagcattgatgggcaattctatatctatcgtgttatccatcttctcgtcggactgtctactcgctaccacggacattggttgactattacagtcgttcatctatactgcgttcaccgatatgacgcgtatggcggctggttatgatactgcgttccggtctgtggctgaggagggtacatgggtatatagccagtcgatcggggcaacaatttgcctgaataatcgtcttttcccgctcaaacatgtcgcatttcaacgtcggctcccttgatggtcgattcgtggggcgacccgataggaggagcgtactcacgcgatccgtcgaggacgttggcattgtgcgcaaagatgctgggtggccagacgaagaagaacagagagatggcgatgaccagtgggagggcgtccagaaggtaaaagtagccttcgtgggtggcgaggtagctatcgtatccattcacaaactcggcgacccggaagatgcaccgagtgagataagcgacgcaggtcaggaggatgacatagtagagagtcgtccatcggttgaggaatcgctggccggccgaggggttcctggatccccaaaccatgtggcgggatcggctgcagattccgggcggagagtgtgagccaccgattgtcaagagctatcgcattttcatcgctacactcacgacctgtatccgaaccagatggtcaaaaaagtgaaaagtccaaacgagatgacttgaaggattaaaccgccgagggtcagctgcgagatcagtagcgtcagcttgaattcgctccgatgatcgcccgactccatttacgtggtcacccgtcttggccatatctccaccagtcgcagccattccgccgcctgaggcctgggtcaggaaggtgacaacatcggcagtaacaaagatcctgacgatccacctggaccgcaagaaaagacagtcttcggcgtcgaggtaggtcgccaagcgcgggaggaccatgtagctgaaggcgaggtaagcgcaaggggagagcaggagaaactgaaggaatcggtggagggtcttcagtaaaggcaattcgtgacttcaggtggttcagacctaccaaattttgaatggcgtagacggggatactatcggcattgtcgccgatcccccaaatgatcctgataagaaatccaatggtcatagtccaggctccgatgatcaagactagcgtccatcgtcgaggcttgacactcttccaccaccctggaagaaagcgatcggtgtgaacacgttaacgcgtccatcccgctctcgctcacgcagagactcacgaaatgagaggaagcaggcgacgagtccgtagataacgagcccaactgcggctgcccaaagcttcggcgtccatccaagtctgatcgtcggcgaattcgcgagtcttcagctgcaaagatcgtccagctgacggtcttggtgaactcacactccttctccgttggccatgtttcaaaagataaagtttcgggatagaggttgaaggggtagatgtcaggcgggtaagagttgcaaaaggtggtgcttttggttcgtatcagcattgaagctcgatacaaaatgaaagtctccaccatccggccattggactgttatatggctttcgactgtgtaatagctcacgatgtccggtctatcccatcgggatatcatcctttcagagcggaggacaatcgcgccgaactctctcgcttgcgagactgatccgacggatctccggaggtgaccaccggggcactggcgcggtcgggcgccctgcgctgcccgtttccacctcgcccacaaggagctcaggggatttgatcgctaggctgtgctgccgcaaagcccgagcaagggatggtatggcatgatacacagcatgtgcatccttttatccgttttggtatcgatctatcttgaacggctagaaactcgacgatcaagatggatgatatgctttggcaacacacgcgcgcaacccggacatccccggcggaacagattgactcggtcatctttcgaatccctagatcataacacttcgtaggtagaagtgtctcgtttcgcaatccaccaggtcgacccggcggaaccatagccggcggcattcgcatgctgcgtctgtactacaaaactctcagtaaggcgaattgcagtcgaggattgaaccacccagaaacgaatacagttcccgatcgtatgcataatcgcatcgtgtcatgaaacctctagtaccgttggaatacaattttgcgagtccaaatcgcctacttcctacttttgctgtctcatcgttatgagccgattttatcggggaggcaacaaacacctatccgtagacatcgacaagtcgttaccccaccattcggggaagggctgggggtttccagcggcaccgaactgtgcaaaggcagaacaagaacgagtgagacatatgatccgcagcaggtctggaggcgatactacttacgacggcaaagttgagaataaaggagataacctgggtaccaccgtccaaggctccggccaacaagtactgcagagtgggcaagtatcggcatcagcaaccgtgatagggaaacaatgaatgacgaactcgaactcacgttgtacttggtgaacgctcgggggtatctcttcctcacaaaccattgcgagaagactccaatgaccatcgagggcatgacactcgagttgataccgaccgacatgtaacacgagtactggcagataatggcagtgttgagcttcttgaaagcggtcctggtcttgctccactgggcagggaggaatcgccaggcgaggtagaaggggatgggcaacaagagaccgattccgagcgaggcagggaccagaacgtaaagcttgccggcaccgaacatctgaggtccgagggcaccccaagagatggcagtcgagttgtaagattgggcgttttgacccgaccaaatctgtaggacgttcgggactgatgtcagctgcgtgaaaacaaagatccgccagcacgaggttgacactcaccctgttaccggaaatgttcaacaagacctccctctgctccgtcaagatcgagatggccatgacatagttcaagatggctccgacgacggtaccgagcatctgagccaaaaaggtgtgcctggggggaatcttcaagtagacacccaatttcaagtcttgcagcaagtcgatggcctggacctgggggttgttaccgtacatggcggcgtacatgttggctaccgggtcaccgggcaacatgtaggcggcgagcatctggtagagaccggttcctccagagacgaattgaccgaaaccgaggacaccggcgaggaaggcgtagacggtggtaaagacaaaggcgatcaagaggatgatgatcagggtccaccaaggggtacccgatttgccggcatagttggtggcctgggccatggcaaaggcgccgaccaagatgagggagaaccaccatcgggggatggcagggtacttgagcatctggaggtagtgctcgtcggtaacgttgctgttgtcctcctcgccgcttccccacaaaaagtatcgccatccgttggtgaacctggccttgagaccgccgaaggagacatcgcggaacaggacagcaatgctggagcgcgggcacgagggagggtccagggtcaatcgttgtcaccgggcataatacgaccatgaagacttactccgagtggtgccacagggcaacgtgcacgagggccgcaccgatactcaagttgttgaccatcaagaacaaagcgttggtggaactgaatcgagcgggtccgatgacgtcgtacttggcctggtcgaatttgccgtcggtcaaaagcgcagtctggttatactgttctccgttctggtcaaagatcgattgcgacatgaaggggaagttgagaccattccaagcgttgccgtagtacactgaagccatgccgacgtaagtgattctgtgtaagatgatgcgcagtgagcaaaaccgattgaccgtgaaccaggaggtttcatgtagatgtccgacttacaggataccaatatccctgcagcaggcaatgagatagatcagcgttgagctgtgtagctcactggatcctcgcgcactcacttgttcaattgcatctccaagggcaagtacaaacagtcggaaccgatgtagttccagtcgaaactccagctgagcagacccataccctcgttgttgcttccacctccaaagatgtttcggaggagggggctggtgtggttgatgaggcagatgatggagacagccgacatgagggggaagacccattggggcaagactatgtcgaggagcgatgatgatcagcagaggaaaagaattgcgttgcgcgtcgacccaaactcactctcgtagacaaacatgaacgcgaacactccccagaagaacttggttcgcttggttccgagacctccgtcaaagtggagagcttggaaagtgttggcgagcgagatcttggcggggaagatcgagtatgaaggcttgacggtgaggtcggtcaacattccggccataccgtatccgatcaactgtgaggcgagcaaggtgaaaatggcaacaccggcgttcattttgttgtcgtagaacaagtcttgcaccgagatgacttgaatctgaagggcgggttgatagaggtcagggcgctgcagaagaatgcagcctggaagcgattcgctactcacggcaatggcggaaccggcagcggtactgcacatgatcaaggtgaagccgtgctccttgatgttccagggaccggggttgatgtatcggaagatacccttagaaggcaaaaacttgtacatggcttcacccataaagtaggtcatgatcaacaggaaggattgcgagacgttctgcaggcaaagcgaggagagatgtgagcgggagatcgagaacaagcgcgaccaacgccgacactcacgatggtctggggcttgaagtagtagatctgcgccaacacggcaccgaaacaggagaaaccgagtcccaagaagagggatcggaaggtgatggcaggaagactcgagtcgtcgtaggtggacaggaccttgactgctacgtcgtggttgttcctgatggcatattcctacagaggtcgtgcgacaggattagcgcccgttgacttttgagatgggatcgacgtcacgacgactcacctctcgggttgcagtacccttttgaatcctctcctccatggccagcacgtcggcgagatggtcctgctcggcaggctcgatgacgacgttggcggcattacggtggtcatccttctcgtcgccgtagatcttcttgtcttcatctgaacgctcgtacgagtcggtctctccccggttgctgagctcgggcagagccgctgggctcaggtcgtcgtggtccttggccatgattgtcagagcggtcttcgaatcacagtttgaagaaaggaaactccatctccttccctgcgagccaactcgtatccctcgacctcccagtcatccacttatatgcaccaaccggtgttggcggcgatgcatatcgcaccatcttacccgaaatcgcgctatcggtcgaccttcggtggacccatgtgctacgatacgatggttgcatgtgcggcccggttgcattcgaggcaatcgccactggagatatctgcgctagtcccgtttctaataattgcatcgtgggggctgaacacactattccccgaccttgtgcctgtatcgtcggacgagcccgatcgtatggcgaaactcgacgcggggtctcgaattttgatccgtcaaacaccacatgcaaccttggatcgaccacatgcaacccaatgatctcggtcggctcggcatacgcgcggacgcgagtggagctcgttacgccaattgagattgcgcattgattgtcggctgaccgctatctgactctctgtttcaacagcacaagcgttgccaaggccaatgaaatcgagtcggaccgcaacgaccgtcgataccgggatcgtgagttggacacgggatcgagcgaatcgcgcgacgtcgtaggtcttgacggtcccgacggttcaatcgggtcttcacgtgatggcgacgagggtcgaggggacactcggacgattctttccccgtctgctattcggatacgtcaactcaaattgttcgttcgatctcgactcaaaaacagaccacccctaatcagcagataggccacttcgttctcgcagctgtgtgacggcgtctgagtgtcaaattagccgtccacgattggctctgccagaagcaactccggctgcccgacattcgatgaggcgatggcgcggggctcctgcattgtatttttattaagcttccgaactactccctctccagtaatctgccgagatgacctcgtgcttccgaaccttcgggccgcgatcgtcgctcgccgcacggctccaagctctacatcttcgaaagataggctccgcttcgacttttcatgtcccatgtggacgagatattttctaccctgcatcgccgttttctccacatcgtctacgcagttctcggcacgatcgctctcggagaacgctcggcccagggtatcgcacaatatctctcctgttctttttcggttcgcaggcgttatcattccgcggcgacttgtacggtgttgctatccagagctatctcggtagtttgagagacgaggacatcgctcgtccgaccagagtggatcgacttggaagtgctcgggaatccgtatcagacgagatctggtcaggggtgacttgcgggtcatgtttcgaagataacggtctatgtatggatgcctcgattatcctgatctcatgtcaatttcgaacccagctgattgtgctattgctatgagttgcatcctggttcgatctcgtccatacgtccgaataacgcctcgaagttcagcttcacgatcgccttgacgtggcgtgtcccgcccgccagcttcatcccactttccttgcctgcttgatgagactgacgatctggcgaacgatggccgcctcagaccagaactgacgagatgtggctacgaactagagacctcgattgacttgcgactggtgacttgcctctttgggacattaaacgggacagacatatatactcacctcgagaaaaacgaccacgtggtcggtaggcgtcctccttcccggactgctcccgacggaaacgccatccgcacctcgagtgtcactggtgaaactcgattctgcgacagggtacaacattgacccgctcactttgccagtatcttgctctcgtttggtgtcatacattactggtctcatgaccacatcctgtaaacaaggctccggttgtacgaaaggtatcagcctgctccacgacgagggacgatccgcgctcgacgagcgtgacgtattgacaagaagacttgtagccgtgatacttgagacctacttggattcacttctatcagttcgacaaggaaagagatatccgtatcatccaggatactcgagctctcgtgacaggtaagtgatgacttgctccccgtgctatcggcttctgagagtgatggatgagccttgcctcgacggactggaagactggaggacggaggtgcttcgcgacaggcatggccaagagcagtcgtgggcgagccttcagtaccgcctcgaggattgtctcgcctcgttctcgactgagaacgtagacggggaggtaaatgaagagaaaatgaacctttgggacagctcttttatggtcgcgattatcagtaccgcatattgggtctggtcgaggccgatacagagtggggcacgggatcagcataccttcatcgtcgtcagcattttatcgtacggagaacccggccttttcattccaggcactctcttggaacatttccgcaggatggatgcggacaatcgagatgcactggtagacctccttcaaaactggggggattgggtgcgtcgccattcgcatgtgatccgtgcaatattctgaatgagtgagctgaccatcagccatcatgcttacgacaggaggacagacgccgtaacgaggtcactcaaacccagttcggtcacctctctttgaactcggatgagaagcagagtaacgacaataaaacagcgtcgtcctcggcttctcacttagacgctgcttttgcgaaaccggacggcccggacaagattcgactcgtacttgcctcgtccagcccccaagacatgggtccaatggatcttccactcgagatggaaagcatcagggacgctatcgatagggctaggaagcaggacaactacaacattcgcaatctggagaactgttgtattcagcagctcgtcaattctctcatggatttcaagcccaacatcgtgcacatcagcgggcatggaagcaagtctgcgctgtacttccaggacgacaacgaccgagcggtagaagtcgcgaaaaagaggatggaaggtctcctcaggactgcccatgaccgctatgggctcaagggtttgatcttcaacgcgtgtttcagcgctcatgatgcttctctgttcgccaacatcgggatctctgtcatcgccatggagcaacccgttggtgacgatgcggccatcttctttgccgagaagttctacggcctgtttgccgaaggaaaatccttcaaccgtgccttcgaagaagccagaaacgctaccagggtggtttattctcgtgagaggattagccccgtccttctcctcaagaattaggaaatcgtggcaaacaacttcgtatggtctcagcagctcgtaagttgtcgtacaggtcgaaacggctgcttcactgatacgtagcatgacttttcctcctaccacaaggcattgcgagtgataagcgagatggacatttgcttttgatctcatcgcgttccgtgatccaatctcgatctccttatgtgaattctcgctctcccaccgaaagccctttcctcccaagtgatgtcttctgctgtagcctttacgaaagtcggatgggggctagtcccaccgagatagacgcctgcggtcatcctgtattcgcaattgcgaccatatatcttcataaaaaacgtaacaagctcttccggtgttctggccagagcgtcgcctggataggctcgtaccaggcagatctcgctcagaatctgcgactattccataaaaacagaagttgcgtcacggctcactctccttgaaattcattatatagaccgattcacacaatcgacactcaatgcctctccatgtacctcttggcctgaagtcctgcccacgccaagcccgccgtacccaccacccctgcggtacctccgagtgcccacgccaacccggtcacgacgtccttctgcgccctctccttccgcagtgcctccttgtaactgacgtctggcctgaaggtgaccatcgagtagagcgagctccatccgctcacgcggggggtggggaacgcctcttcgcataacgtgggtgatgatcccgccgacgtttcctgcaagatcgcgcgtttcgatgagggtggcatgacaaacgagaggacggaatcgagtacgcgtcggatatggtacgtcgggctgaccaccttggatcgcatctcggagctgagagtgaggtgggacaaatcgtcagcaacgtgtgccactgcagcgcttgccaagtcgcccttactaattgtccatggcgagctgcacgatagcctccagatccccgtttctcacgtccgagtactctcgcaacgccttgaccaactgctcgtcccgctgtccctcgaccgcctcgctcccaacgtcatatttttgcaacaagctgttgaacaccctgacgtcttcgagaccgcaattgagaccctggccgtaaaacggtaccatcgagtgcgatgcgtctcccagaagcaagaccgaggccgaggagacgggtgacaagtggtgcgacggtttgacctgcggatgcgacgacgattagctctccagtcctgaaagcggtaccctgcctcagtacccacgttgatggtgacgagcgcgccccttggattcttttcgaaatcgctcaacaacctctcctcgcctgcccattcgagcgcgtcggcgaaatgctgttcgaagaacgctttggcttgttcccgggtgttcaactcgtcgagcttgtctttcgggcagaacaaggtgagggtgaacgatccgtcctgtggagcgtgggcggtcagcgacatttgcggagacgacaacgccatccgcgaccgaccttgttgggcaaggcgatgagcatgaatttctccctcggccagatgtgcaaataattcgtctccatcaggaactctcccggtccgacctgtttactcctcgccctctcgtccgcctcgctcttgggcggcatgtgcaactcgacgtaatcgtgatcgatgaaatgctgtttcaaatcgaccctctcgacgcgcatcatttcttgcctgaccttgctccaactcccatcacacccgatgatcaggtcgaaatcgtacgtcttgccctcgacggtggggttgtgtaccttgtcgtcgtcccgttcgtcttcgttgggctggacgctctccccggcgttcttgtccgacttgctcggtttcgcatgggcggtccgggtggtccagtcgatatgggagagtttcgtcgaaaagttcaatccgatctcggctggcaagctctggacgagacgcaggttgaggagaggtcgggggagcgagttgatgcactgtcgacggggggtcaaagggttagccccgaactggcgatccgacgaaaccgacccacctcgccgtcctttgggtcgtacgcttgagcttctcgtctgtttcccgttttatgatggatcatcctccccttcatcgggatggcctcttgcagcaactcgtcggccaaggccgggtcgaccgatcggagcgcggtgatccccctagcggagatggcgaggttaatcgatcggaggttatttgggtgtagagattctttcctggggtctgccgaggggcgtaggtcgatgtagaaccggcggtgatcagtcaagacggtcgccaatcgagtttgtcactacgatcggacgaggccgatgaggatgagatcgagaactgacctgtcctgccttcccatacttggacctcccatcctcgtttatgcaagctcagggcggtcaatgaacctacaggtccggctcctacgatgaggactcgtttcctcgatgattcggttggcatgtcgaggttggtcgggtagggtatatgtttgagctggcaaggttcgcgatcgatcgacggacgaggcgttagtcacggccgtccaagatgtcgcaaagacgacacgattcgagcgcgatcaaggacctactcgatgattgaattgatctgcggttcactacagctaggtatgagtcgtgtagcgtcagtgttgatgttggtagagtagtagtggacgtcgatgatgatacccacttgactgtaccttttccaacttttcccgatcctttccctcgtcgacgcaaagtggaggtccaaccacttcgctcagagtgacgacatcgaggtggaagacaactactatacacacatgtataacctcgactacctgctctgctactctcgtataactacctttaccaccactacaacatcgtcgttacacacccatcgagatgctcatcaccacgaccgaaccccctccccgtcgaccggtcatccggcgacgatacatcgagctacacgaacaaccctacaccccggctttcatccgtcagccggtccaggacatgttgaccttggcgtggacgaaccgttttcccgggttacaacgacaagcgccctctgaactggtcgtcgatgtgctcgaacgggtgttacgtggcttatccacgggcaagcgaggtgcaggaacgggtgacgagggtgcgggtgggatgagcgtcgttgatttctgttcaggcgctggaggtcctatccagacgatcgagaggatcatgaagtgaggccacaggctgacgctccacatcctcatctacctctcctgaccctcttgcctgacttttgaccatgccgttcgacctcggtagtcaacgccggaccgctcgttctctgcccccacttcccttcctcctgaccgacatccacccgcatgtctcggcatggaagacggcctcgctatcctcccccacgcgttcgttgcactacgtacccaccccggtggatgccacttcgtcccctcggaacctcgtcgatctgggagagacggcgaggagccaggacggggcggatggatcgagggtcgtctcgacgcggagacgtggtgatcgacaggggaatggcaaggtcgatgggaatggaaatgggaacgagcatttcaggacgtttttcctcgctttccatcattttgatgaagagatggcggtgagggtcttgaaagacgccatgctcaattcggacgggatcgggtgagtcctcgtcgtcgtcgtcgtcgtcggtggcccggaaagagtcgatgggaagcgcgagctcattcgcaactctcgactgttcgtgggcaacgctgacgctgacgatgacggtgacggtatggggaaacagcatctttgagctacaaaagttcgacattgggagcttgtcgacgatcacgggtctctggccgctttcctggatattcacgccgacgttgaggcctacgttatgtgagtcgcctcgtctcctcgtcattcatccgtacgaccttcgactgacaactcgccgcctcgactcgtcacagtgaccttgatcttcacctacctgatccccatcgtcccgttcatcttggtactggatggctacgtctcggcctaccgttcgcgagaatttgaacatgcaagtccttcgtccctcccgaggtcttcacgatcccaagcttacatcaccttttctcagatccgatacctggccaagatcgcacacgatcagctcgtgcttgacggtttgcgacccaagggtggagaagcgtggttgtgggagcaagggagcgagacgcacacgtggccgggcggcaaggcgtattgggtcgtaggcaaacgggccgcctagacgggtcgggccgagtcgcctagagtgacccccgtagatgagatggggcctgctttgggtcggtggtcagtatgactgacgatcatagcatgcagcatttatatcatgtttcatgtcatatgatccccctcctccccctatctctgagctgagacttggcgtcaacctgtatactccaactctgtccggtccgggtcgtcggatttcccaaatcacaaccttcgttattgtccatattgtctatacatctcatcatctatccatagcactacagctagctactgacgaccaccaccacataatcatattcaacatgaaggccatcatctctccctctgtactcgccgtaagaacgccgcccggaaagcccggactcgacctcgttttgaaagctcgactggaaagctgacatgcgtgtcacccttttggcctgtcgcagtccgacttgtccttgttgacgaatgagaccaagatgatcatgtccgagggagccgattggtgtcacatggacgtcatggatgggtgagtccaagttgcgtttgtcacttggaggtattagccttcaatgtcatcgtccacggtcagagccagcgctgatgacgtttcccctacacaatatgacccgactttcttcgcacaacgtctcatcgatcgcaattgggaacaccgacttttgtgaacaactactcttcacgacggctacatgcgtgatagtcactttgtgcccaacatcacgttcggccaccccgtactcgagtgggtcaaaaagggcaaccccgagatcttcatggattgtcacatgatggtcgctgatcctctccgagtgagtcgtcgggtcattgcggtcgaacgtcgactaaaagggatctagaccgagatcccttgggggtcacttggctggacgagacgaggtcgtagccgcacgtgagctgaatgtgacattactgttgtcttttggctcgacacgcagtgggtccccgacgtcgccaaggccggtgggaaactatacacttttcacctcgaagccgcccgtgagtcacatccacgtccagcttttcccacctactaacgacccgcccgccttcgatcgatcgaccgaccctacagccgacccgctccccgtgatcaagtcgatccaatcgcacggcatgctcgccggactggccatctcacctcaaaccccttcttcatcgatcacggacgaagcgttccacgccgccgatatgatcctgatcatgaccgtccaccctggcgcgggcgggcaaaagttcatgcccgagtgtttggaaaaggctagagagttgaggaaacggttcaacggggtcgagaaacatatccaggtggacgggggtgtcggacctggtaacatttgtgattgcgccaaggccggtgagtcaagagaagggaggtcctcctggggagttggttcgattccagaggtcaggattgctaaacgtctgacgtctcaggttgcaacgtcattgtcgccgggacgtcggtgttcaaggcggattcgcccaaagaggccatctcgacgttgcgtacggctgtgaacgatgcgtgggaggaaaagctcaagactgggcagtgggatcagtaggcgctgggggcgaggtcgtgggtgtgtgtttatatagatggaaagcaaacgagaatatgtgatgaatggatgtaccacactctggtgacactttgagttgataaccggagatgagcgcgataaccggaaaactcaaagtcgggtcaggtcaggtcagcttcgatctggaatacacaagtagcaagacgatacacactttgtcaggccatcatgtcgtctacccaagactgcacagtaaagtactactgatcacaatctaccaccctgctcgcgatgaaacaacctcttgtcaatccgacctatcagcccgttccacacccggctacccggttcgcttcatttaggtgagattcccgagtctctctcactctatcgagtcccagctaggttcgatcagaccgccagctcacctctcaaacccatcttgggcgacgttctagcgaattctaccctttctacttgggtgaacatgccaatcggatcaaccggatcatgcacctcctcggcacgtccgtgtcggtcctctcgacctcccgtgtcctcctctctttgatcccttacctcctcacccgactggatatcaagtcgatccgggagacggacgctctccgtctaaccttgagagaggctaggaacgtcgtcctccgcggtatcgggattgggtacgcttgcgcctgggtgggacatttctttgtcgaaaagaaccgtccagcgacattcaaggtcagttttcctgctctggcatgggttgcgagcaagcaactcgtttccgtttcgagtgaggtttactgaacacgtcgtgcgtactttccgaactcgtcagtacccgctcatgtcgtttatgggtgacctgaagatgctctccgaggtcgtcaccctgcggcgtagcatctgagcgtcaggtcgaccttgcaacattctgataccggccgagcagcctggatacctcgtcagtctggtggtctggttctgctgatagcaagaacgggggtcgttccagtgtacctatcatcgccggcatcactagccaaacgttgtagtagtatgtgagcttacagataaccaccattgtatatcgagaccacccgctcaagccgaggaccacggcaagacttgtcggtagatctacagccatcacgatggtcaaggttgtaacgtattcaagacaggctcctcttgtccatcgtcggtcgtaaataggaacctaaaccaattatgtacttgatctgttggtctgacagtgcttttccgttgatacgtcaatctgtcttttatctctggaagaaccggctgacgtccagtgtcgagagcaaatcgatctagcaaatacaaggtcgaaagcttgtcactactggtgatgattgcgaccctcgcaaacgtctgtcgcctgttgtaggtgaagcacacgacctatgaagatgcaggtaagaaggacgtggatgtggagcaacatctcggatcaaaagtcgacagaaagcgcagtgcgcagagtgattgatttctcggtgtagcatggtacgttcccttgatttgttcaaccctctcgaaagaagaagagcggcgggatcgcttgggaggtaagaacagtatggcctatcttcgctggatcgttaccaattgatcaatagctcgaaccaagatctttccattcgaccgatctcgccggccacactggctgtatggttgacgtcatgacctgctattgtttattgttgtttgtcgagacatgactggtccaacgaggacgttattattattgaggagccaagtgttcttccgttatcgaacgtttcatcgcgtcgactaggagctcacgtttgaagccaagatgccacatcgagctcttgccaccgtcggtagccgtttagcttgcagatgggatggcgacccggcttgcttgcagtctgcacgcctcgaagtatcgaaacggggttgtccacagcttagaagctaggctgcccacgtccagactggcccttggtctcatcttggacgtcgacgtcgatcgtatcgtccatatcgtcatgctcgttaatgtctaaaaaaacaggtcatcatcgtaacaaccctacccatccgatctcatcttgctcttcccgttaccgccctgccccaccacgctcgtctctcacctgacgacctcgtaaacgtctccgcccatcttcatccccatttccgggcgtttcaggacctcgctccagaacctcatgacttcggtccattcgtccctgttgcccggcatcctgatatctcttccctcgtcgtcctgactggcggccttggcgtcgaatttcccggagacgactttcggcgtggagaatgtccttttcagccacaagggcgggttcgacgacgacaacgacgacttggggcggtgaaaatagagtaccggcgtctctgctcctagatcctcggcccctacggagggtgtagaatacaactcgcccgcgaccgagacgacggatccgattctcttgacctttatttcctctgtagacgccgccgccgccgccgtcgccgctgctgaggaggaggagagcttcaacgacctagccaactcgagggcgatcgtccctccttgtccccatccaaaaagatggatttcttccggttgccatctgcaatcctcgacgaggtgtttcaacaggtatctcaaaagtggcaaggtggtctgttgcatggccttgagttgatcctgcgtcggtgtaggaggaggatcgggcgagaggtaatgttgcatgttgatagggaggtaagcgtaagacgggaaatccatgagggggaccctgtgtggacacgcatgtcagcgatcttgagccaggtagagaccggggttggggacgaatgtttcggctcgggggagtttcatactgactggaagaaccctcttagggacaagatggacgtccctgggagttgccatctctgtgcgagttgaaagaatggggtttccgtatcgcctaccagaggtgagcagggaaacggctgaggtcagcagcggtacggtaccagccagccagccggccagccagctcgatcgatcgacgacgaccaggaccagaacacaccaataccgtgcaacatgatgatcaaatttctatcctctccatctttactctttgcgtattgccatgtcggtcgaatcgagttgacggggtcgaccttggcggggacgggtctaggtcggttcggtgtttgttgggacgttgaatcttgctctactggtctcaatcggagcggtgtttcggatggcatcatgtcagccagtcagtcgatgcctggtctctctcgagatgtcctcaagctatgcaaggctgtatggtactgggatggaatggatcgaatgtcaattctgtcagttaacccgatgaacgacgtcattccctctttcctgcatttctcgccgagaccctcgagtctcccctggtcggaaaatagaaaacgacaaccaatacaacaaccatctcgtcaatttgacaacgtcttcgtagatagagataccctaccaccatctacttatcatcattatccccctcgagatcagctccacaaggatgctagatagttggtcgtaaaggaaattctctgcccgactcgacccgaatcatcgaataccggtggaggaacggggtgactgagctcggatcaccatgttgtcatcatcatcatcatcgtcgtcgtctgcttccccggcactgacctacatacaagtgtacgtatcaggtctcgaatcatgtcgcacgaataccactggctgatcatggcactgtctcggacacagacacctattcctggtcgttccacccatcttcctcttacgacacctctatggacccttgttcgggaggagggacgccatcaaggtcggatggttgatgttcatggcaagtctcatcgccgagcttatcattccatgtcccgcaaaactcatactcttttatccctgtgcacgaccacccccaaggcgaccatctggaccacaccttgggataacgtcagttgttaccgatccacccgacccctcgctttcctctactgacccgcactccgaccttgcaccctccgtcagtggatcatctcccgttctgcctggtcttaccctcccggctcgatcctcttcaagatctggcacgtccccttcgaggaacacctcttcttcctgctccaacccgtcctcctcatcctcctccaggccctgatcggtctaccccgtgcgatcccgtttcaatggcaagacaaacccttggtccgtagcgtggacgccggaccggaaggacaagacgctagtagcaagggtcgcaagaggatggatgaagacaaggtgcagacgttgcccaggagaccactcgccgcgtttacatggctctgcattatgacgatcggtgccatcgggctattcatccccccgaccagcctgcccgacctcgtcttacacccactagacaccactgcgaccctcttacctctccatcccatcgaaggccgtctcttttacctctctgccatcctcgtctggatctcccccgtgctcgccctcctcaccggactcggcgccaaggtggacctcgagggagattggatcgcttgggcagtagggaccgggtacctatggatggtggataccatcgccatccgggctgggtcatgggctatcgatggggagaggacgttgggtatctttctctggagaggtctgcccgtagagtgagtctctgttcgactttcgggctttttccatatccaacagtgatgacgaggctaatccgcgggggtttggtcgcttttttcggtgtgctcttcgctcgctcgaatagagaggcattcttcttcgccgtcgtctcgtacctactcgtcctcgcctcttccctcatctctcacctacacttcctgctcctcctcgcgcctccacggacgcccggttcgacgccgaccccacggtgtccaccggccaaccctttccgtcacatcacgctcttgaccaagctcgccctctcccccccggcgatcccgcttcaactcctccgtgccctcgaatcgagcgagacgacgctcaaggcgggcagcaagagtttcagcgtggccaagctcggatggagtcgagagatgcgatgcgggttgatcaccgtgtacgggtggtgtcgagtcaccgatgacctgatcgacgacgatcatgacgaggccggcgaggtggtcagtatcgagaccaaggtccagagcgaggaagatgccgccgggtcgctcaaggagattgagagcaggaaacgaagacgactcggcatgatgcgtcggttcttggatctggcttatgccgaggacgggcaggacgagttggatgatttcctggtggctcaagtcccgacccgggcgtattcgtcgttttacctgtttagcaggatcatcgtcgacctcgtccctaggcgtccgtttgacgatcttttggacgggtaccagatggacctcgaatttccggacaagcgcgagatgctcgagctcaccaaggcgcgtgccgacgacgacgtgccttgggccaagatctcacctattcagaccgaggccgatctcgttctctatgctgatcgggtcgccgggtccgtggccgacatgattatccacctgacttggaacattctcacctcggaaccgatcacggccgagaccggttggaagctttctcctgctcgtcaagagacgctcaggatgggtcgaatgatgggacaggctctacagctcgtcaacatcgccagggacgtgcggagcgacgtcgaagcgatcggacgaatatacatacccatgcaatggtttggcgcaggggggaaggagggtcaagagcagatcaacaggctggcgcatcgacctggagatctcgtgggcgctttcgacgcacccaaatatacccttcgcatgctgcgcatggccgagacgctgagagacggatcgagcggcgccatcgaggacctgccgcggacagcacaggcggggacgcgagccatggtagcatcctactttgagatcggcaaagaggtcgaacgcaggggaggacaggtgccgagtttggaacagggacgcttacgagtcagcaagcgaagaagattgacagctgtactatggagcatttggggcctttagatgataggcctagcagggactctcgcctatgatcaagttataatatgcatgttgtcttccgtttacctttccgactgaccgactctcagaatgtctccttgagacttaattttcacggtttccagtctgttgagcatgcacgaacattgagtgccttccccaccacacatcgccttccaatacctcctcgcgtcatcacgacgacgaagagtccctcgatgcggacatgatgttagctatttgttagctgccctagcctgaccccgaccgtggactgaccgttttatctcatcatccttgatggtctacgcgatccgctggcgctgattgatagtgatactcaagcaacaatgcctcggtaagtcgtgctgggacattttcggcagtcaatacaagatgaaacgcccttcaggactcaatgggaatgcagtccaaaaggcgatcagtgagcgaaggatcgttcgccgatctggacgatccgattgacgcgactagccgactgatcttcccctactacccgtgcataacctgcgagccgtacataacctacgaaagagcctcctgtatccataggcagatccctcaagcgcttcgattctggcttcatctgtagtaacatcagttgcctatttcgaccgggtcgagttcagattcatttcggtcttctatgatggaggcgcgagcctgacggatggcttttcaatctaggtctatacaacgagtgttctcatgcgtcgctcctttagtcgatcgacattgagcgatcacgaacgcgtctgtatatccttcatcgggatgtcttcccacgaagctcgttcaggtatcgccgccagacctggagggttcagttagagaccgggctgtcctgctcagcattgtcatcgtggcaacggcacactggactactgacccgcaagttcctattgccgatccccatccaattcggtatagttcacgtcattcttccctcgcatcgcatcgaacatgcgcttcatcatgcccttcgagttgccgttttcgagcaacttgctcgacgagttctgcctagtcgctcgagtccgcgagccagcgcgactacccggtcgactgcttgtcggtgtacctgagtacagtgacgactcttcgtcgtcgtctcggtcgtcatcctcgtcgtcgtcatcagaatcgggttccgctttctcgtctccgaataattcgcttatattctcgagcgagcaatttgcagtttccgggaacaaaaagtagactagagccgcctagcgtgagtgtgacgctccaagtagcgttccttctcgcgacgtaccgatgacgaacgccagtgcgcaccatccggcgtgatacgggtagagcctccatgtgataacttcttgcaagaccggtgtcatgaccccgacaatatagttgaagaaccaattctatccaggcaaggcaagtcaatgacgtggtcgtctcccctttatcgaagagccatactgaccgtcgcggtggatagcgaaactcccttggctcggaagggcaacggcatgatctgcagaatcggctgacgtgaatacaaattttagactgggatcggcgagcacgaacctcggggggatatagccagggaatcggcccccatgacattccaaaggccgcattgtagatgacgatgcagatcaccactgtgcgggcaccacgatggcatcagtgaaagggcttcggaaccggagaggcgagacggccacgacttgcctgcattaggtgtgatttcttggtcaatgtagatccaccaacccgtcgcactcagagcaatcgccatctggtaatttaggtagtcaggcgtgagtgagcatcaaggcaaagtaaatcccggatagtaaagagtacccacaactaccgctccgcttagcaaaatgggtcttcgtccgagcgaatcgacgatgaaccatctgataaggaacaaaatccgaaatcagcagaacgcagggtccgagaggatgccctcgactcacggaacgatcgacgaagcggtatagaccaaaccgttgattccggtcatcaggatggcatcgcgaccgatccagccggcctctatcgaatgcaaagctcgttcagatgcgcctcgtatagccagctctcgccgtcactcacgctcaaacaccaggggagcatagtacgacacgacgttgattccagcctgactcgcagactgggtatcagcttgcgagcgagcgatgcatcttgaagccaacccactcaccatctgagccaacgcttggctgctcatggcgatcaagaccctcgatctgtacctcgtccataacgccttgtagctcctatccggtaccaacctatccttgatgacggcttctttgatgatcctaaactcttcctttgtgatcggatcgtcgaggtctccattatgaaagtcggcgaggatccgcatcccctcttcgtcctggtccttgtcgatggcgtatcgtggggattcggggagggcaagagcgccgagagcgaggacgagtccaccgatacattggatagacaaggggattcgccatgcggcgtctgattcgatgtacgagcaaaagtagtcgatccactacgagttgccaggtgtaagcgaaagtttgcgagttcccacggtctacagactcacgatcgatgaagcatagccgacgatctgtcgaaaacacgatgatacgatcagctcgaggtcaggcgagagtgttttcctgctatcacgactcacgttcaaggtaaactcgatacaagccagtcttcccctctaacgatcatcccgcatatcagtctcccgaatttccccgaatcgtgagcttgtaccgactcacatgatccgctggcgagatctcgctctgatacatcggcacgaccgaactcaagagccctactcctgacccgctgatgatccttccgacgagcatcatcgaatacgacacggtcaacgtttggatggcgcctccgacggtaaagatgcatgctccgacaaagagggtgaaccttcggcccttggtatctgcgagatgtgccgagaggagggaggtgactatgggagacgacgtcggatgatgagctgtcgggtcgagatcaaaaggcgaccgagctgataatgggtgacgaactgaaagccccgatttccaggatggctaccatatgaccgagttccgtcgcagatgggttgtcgactatcggtcattggcgtcggtttgagatcagctcggatggagaggacaaaggtaaagtcgggcgaggtggagacctacagaactttttgaaatatgggtttgtgatgagcccagacatgacacctctgcatgggcaggacattcagtcaagtactgatctcgacctgatatgacacccgtattgcacccactgatcaaagccgaacagccatactccgatcgagaggaagatggagacgccgtagagaagcttctgaccgacgaccttgctacccgtatggccagataaccgcgggacgtcggatgcgctgacaagaggcgacatcgtggcgatgtatacgagctggaaccggagactgtgctgatagctgtgtggctctgtgtgactgtcagttgtcgcaagtgggatagtggtgttgtattgtcacttgaaggtcgacctgtctgtctctaggttgtggagtcgattgtcgtcggtcttgcccgcgtcagaaagcgactaacctaacctaactgcggagagatggtgttggtcgttacacgtcgggtcgtgatatgatggaagatcgggtcaaaagaggagacgatgatgattggcagtacagaattctacccaggtgagtcaggccatgatgttctgatagcataatctagtgcgatgagttggtccagaccggcatgaccagcagctttgaacggctatctatcgaatatcgccgcccagcgttgccgcgtcgaggtcgtggactagctcgaaagccatggatggtcggtcatgaaagggaaaagatcaacgggacgtcgaccgaaccgcaccgaaccacaatgcaaaagaacaaagtaatcccataaaacaactgtcatttatatagagtacaaattacattccctgtgaacgacgagcgcgttcgaaccgctagtgtcgaggcggagcacgctcgcgtttcaccgtaaccatgagaatcacaagcctcgatcatctcactcctccgctgacgtcgaacgggtacgcatccccagcctaatgcaggaacgagcggtccgataaaacgcacgctcgctcaagccgccgtggtgtgcttgtgctcgaggtggtcgacgtcgccctccaacttcttctcgtcgtgatgagccaactcgtcgacggtcctctcgtgcaacgcctcgaccttgtcatcaccgtcaaagatggcggcgatggcctccaaagagggctgtcggaaggtctcgaccaggtaaaagtctaaaggtagttgagcgtggtcagcacattactcctgggtatcgtagtcccggccgagactcacagatgaagacgacttcgaaagccaagaacgcgcagtagacgatgtagtacttccactggatcttttccagggcgacgggattactgtaagagtgcacgaggtcgggacttagccacggaacatgcgggtcggcactggggggacgtgcgacttacacgtattggttgaagacgagggtgatgttgacggccaagttcatgatgaccaatcccttggctcgaattcggaagggcaggatctcgacagtgtaggcgacgagcaagggggacatggccaagttgtaaaaggcgtagtactgcggggatcgacgggaccaggtgagcaaagatgctggctcgtgcgttcgagtcgctgcacttacgatgaagatgaacgcgatgaaagcacgaccggcaccgacagcagagtgcaactcggttccctcggcgtcgattccggtgatgggagactggttgtagactccggcacagacggtacagactgtgaggagacatcaaaatgtcagcgcttgcaccaggcgaaccggcttgaacggaccgcatactcacgagtgaagaagagggtcattccgatggtagaagccaagaagaggaaacgccttccgagtcggtcgaccatcatggcaccaaagatggcggtggcgtagttggtgatttgcaagattccgttgatgagggttcgggtctcggccttggaaacaccgacagacttgaggaccgagttctgagcagacgtgtgacgaagagacatcagcagcggcctttcaagagggcacagcggttttgaactcaccaggtagtaagagacgagaccgttaccggaccactgggagaaaaaggcgatggcgatgatgatcctcatcctcttcaagtttccccttcccttgaagagactggcccagctggcgctcttgtccatctccctctcgagctgaatggcggccttgcactcgtcaaactcgaacttggccaagggatccgaagcgtcaccggcacagtggtatttgacaaagaaatccatagctcggtcctccttgccgttgttgatgttccatcgaggcgattcggggatcaagaagatcagggcgacctggatgatcgaagggagtccctgcaagagggaagggacacgccaagaccaagtgttggggattcggaaggtaccgtaggtggcccaagcggcgacgatggaaccgaggtaccaggacgagttgtacagcgaggtgaggggtccacggtaggtagggaaggccaactcggtgatcaagaggggcgcggcggtacaggcgaaagtcagaccgaatccgataaggctataagcgcaaaggagacattagaaagacgggtcggccgaggggaaatcccgcaaaatctgatgcgtacgctcgagctctgtgatgaatgggaaggatataggtcaatctgcttgtcccaagaaaagcacgcgaaccgatgtagaaacgtacccgataaacattccaatgttttgagcggcagtctggatggcgacacctccgagcatgactgtcggggttgtcctcattagactcgattgaaaaggattcttggcgcctccatcactcacgacaacttccgaaaaagatggcggctcgccttccgaacttgtcggcgacgtaggcggagaatggcagactagaaacggaaagacccaaacgtcaacctcgatcgcgagcaaacggcgcgtttggttcgacttacgctgcgatacctccgatactctggatggcgttaaagataccaagcagagatccggtcggtctatacaaatgacggggacgattcgtcagtaaacgggatccgatggatgatggccgcgcttccgacgtgacctaccggttgaagtagatctgccagttctcgacagtctgtaaaccgttcatcatggatctgttcgtacggagagcattataaaagtcagcccgctaaggtctttcgactatgacgatggccacgatagggatagtccccgatcaacgatgaaacgctcgctccactcccgggatcgattcgaacgcgaaccgcggatccttttttggcgggaacagttcgggaaaatcgtgcaagcagagagacactcacccatcgtatccgttcgtcatcgaggtcatcaggaccagggcgatcatggcggtcaagacagcctgtcgtcctcggtaccacctgatatctcgtccactgagaagcgagtcgagggtcgcattgggtccggctacgtgaatagcgtgttccgtcatcttggcaggaaaaggatatcgaaggtaggtgtaagtaggttgtggtggtggtgattcgactgggccggttgcaggtcgagtcagtctaccgttggtcttgtgattccgatacgagttctgccatgagagtccgagagtacaacccaggatcatcacctgcgagctatatatctatcgaacgacctgacgctgtatgatcggagcgaggcgtattcggggttcattcccgatgtcgaaacgtccccgtaccacccgagggacgacaacacggcggaagaggggcaccatggtgaaaagggcagacctattgttcggttcattcgtcgggctgatcgactctcgaatcgatcccgcctgttcagctgttcacatgtgctacatcgtggacatccatcccgtttcctctatccccccttcgctgaggccccgtgggtttcctcgggccgccacctggcagttccagggccggctggcacctctggctgacagcctggcactagcgccgagaccccccgtaccgcgtggttcaacacggggcagcagacgcaggcctccgtgcgtgaaagcccgatcaccttgtaatgatccgtgaaaaattaccaattccatcaatctactgggtgctttggtctatccaccgacagcaaaaggcgacccacctcattccatcgacctcccccgctgacagtccgtgggcctccccgaagaatcaaccgatgctctaatccgggtcgcaaggaaccatgcacgaggcaaaggcacgagagcgcggcagacgcgatctgctgatctacgtagcatccgctctcggcttgtgatggatcgccagacattttgtttgttcaacactcttcctattctggctctctctccgtgaagccccacagccagattaggtgatcgctttagacttttcctctcgacctctcggtcttcgcctttcctcgacaggtcaaaaggaaaggcgagaagagacccaccgtaaacaagcgagcgagccaaggcccaaagaacaggatacagaaacgattcggtctcatgaccggcgatcccaacggagcgagtcgagcgatcacggtcgaataaccggtcgatccgtccctagctccgtccgtgattccaacaagcgaaacctacctacgctcgtctgctcattgttcttgccgcagctcacatgctcagggtgaagaccgagactggctagactgggcgatgtcgacatcgccatgaccatgcctgccgcatcatccttcttgtcatcacatgtctttgcctctcgaatccagatccactcgccactgggtaccggtggtgttgcccatgtcaggtggtggcaaacaagaccgctaagccatagtggcgaggcatacccagtacatgctcgtgctaagggccgccctcgaaatccgagtacacataggtttaaaagactggtcaacatgccctagctgattacaatttggcctttgtgggctcttcctttcgagtctcgtcgtcgacatcggcgcatttgcctgccaaacgcccaaacatgtcaaagtatacactatccaccgtcgctgctgctgaggatgcttgccctagggcagatctcgctgcgattccttgtgagatgatggccactgcgagatgcaacgatgcgattcagtaaacaaggtcaggcgccacatgtccctcggaaatcgaggccagacttacacctccagagcatccaacttcgcacccaagctagccccttgatcggatgttcccaccgactgtgcgagaccgccggtgtactttcggtcctctgtccgccctcggcttcccagaccttcatgaccttgccattccactcttccccccgtttcatgcattccacccagtacgcctccaaatcccggatgtgcggtacgcagaggacgtctttagggatattcctcaaccctttcaacaagttggacgtgccggcaagtttcttagtcgtgatcggggcatcaccgcgtttcttttggagacgctcaaaggagatggacgcgggtttgcattcgtctggcacgtcggccgagtcgatcgagtgagggagggtcaagttgcccagatctgaaagctgtggaaacccccgtgcagacggtcaacctcgactcgatcctcattcttgcgcgagatcgtcactcaccggcgatccgagcgtacaaagttcccagtcgagcacacctacgactctccacctcccttgtgcgttcctcttgaagatcaagttgtcgatcttgtaatccccatggaccaagctccagacccccttcttcttttcctcttcgcccaactgtttggctccccgttggagatacggcaccatcgtctcttcaccctcgatcttgcccgtggtctctttcgggtagtactcccctctcaagtctttacgcaagtgttccgggatcttcgtctttccctgcgcttcgctgacccggaggagacccttcacttgacgttcgtaaaaggggacaggcttgtgtgggggaggtccgaacgatttgggaaggtcaaggacatccagaggcagggtcgacaagatcgttaacgtcttgatggccatcttccagctgcacccggggcggggaggcgaaacgagggttaggggttagtctcgccctgcaggaccgaacgtcacgagctcgtagcctgggacttgccattcggccttttcctcctcgtcttccaattcgggaaactcgcaatcctcaaagacgttgccctccttgaattccattacgtagaactctggcatgccgaccttgtcttgtccgtctttccgcttgtcgtcccccgggtaatagccatacgttcgagggatggggaccaaccactcgtcgctttcatcttgcccgaggtcggcccggtgggtgcgtagatatgcattgtagtgattcagacaggagaggacggtgtattcacgtaaaaggttgtgagccgtcggtgagatgagggctcccgagggtcgagctcgaaggacaagatggttgtcccttgtagatagcagtagattcgggtcaacaatcgaagatgaagatgggcgaacgtcggcagatactaacttttcatctaccaggagataggtcggattcgacttcaggtgcccatcaaggcatgcttgtcagcacgagccgtgcgtagctcctcgaaacaaacttacttgtccaaactgaagcaagacgatagcgatgatccatcagcaagaccggcatttcccccatcatggccaacgactcacactaaactgcttgacccttttcagctctccccagcctgtccttttgctctcatccgcgctcgatccagcggtaccctgctgctcctggctcgatgtggccgagaacacggtcgacgcaagcgagctggcgaggtacggctgaagcgtttgtagcgggagatgatggcgagtctcgacttgtactggcatgacggtaagttttgtggatgtgaatgaatgacgaacccggtttgtacggctcggtgacctgtctgaaccgtctgacgctgacaaggtatataatccgaccttgacctcacagctttggttacccccatttaccccccggttatctcgccggctcggccttcgggttgcaccggttagaacctgacaagcgctaacaaaaagggtttctatcagtggggtggagtaaccggtgaaattacacgtcatcaatcgaaaatcaatagactactctctatcaaagaaacccttgagtcccgaaactcgcgagctacaagttgaggattgcgtttcacgttagcagagcagccggtgatccacagccttgaactcggacgcataatctacgacgttcaagtgttcatccgcccagacggctacatggtcttcaaggctagtatattcgactgagtttgtcctcgccatcgacctctcgaaccagcttgccgagcttttctagagacgcgtcgacgagtcgcagctcgtgtgccagatgacgggtgaacctgttggattgtgccatgatgaagagccagttacaatccgatcgctcttctatgcgatgctcgggtacaatcctgattgtgctgcgccaaacatgcttctgcagcatgttgagaagcgccgggtgatgggtagccagtaagattctaagtcaggccattgatgatatgtaagcaggccacgctggatgtcggcgaaaaacggcgagctgtgatcctgtgtatatccccttacttttggttgtacacctccttgccagatcacgagcaacagtcggcgctgtcactgcgcggttcggatggcatgggtatctaacttacgatggggcttggaatatcttcctgatgattcttgatctcggtcatatgccggactgcaccagaacctgatcgacgatccacatgggaatacggcctcggcgagttcaaatacaggtctcagctgcccgcgcctattgtgtggtaattgttgacccgatcactcgacggatattgggtcaccttgatcagatgacacgccatcatcagtgttatagaagctactaaagaaccacgccaaacctgttcatacctatagtctcgggctgtaccatcttcaccttgtcaagttctggctcggtctttccgtgtgtacctgtcgagatgagctggtacgcttcctagaccgctaggcgagagtcaggaggatgcagcctcaacttgaacatccaaatcgctagctgaagcggagtgcgctcatccagcaatcccccagattctcgtacggggcgaaggaggttgtgaaccggatagaagcaatagatgtgcagagtgagcttcggtatgcttgctcgatgccgttccctttacgaccgaaccagatgacccttcatcacgcctacatgttcgagtatgttgcagtttccgggtcacgcaagtctttctaacatgatccgaaagcctcccgtaggttcccgactcttcaaaccggatgaacgcctctcctgccccagatgacatgtaaggcccgtatcggttagcaaaccttcgaatgaggctcgagagaacgattgcagactcggcgtcggtcctgctcgggatacaaggccagactcgcgcagtccctgacgtttcaccgggtcatcctgcccgactaccagggtacacttcgcccaactctgttgaccaggacgctgcaggacaccgcgagacgctgcgacttttaggtcgaagcccgcattcccgtgtccgcttactcctcatatcagccagaccatctcccctgatcatccctcacccgctgtcccggagatcgccaatccgaacacgaccttatctttcgtttcatttccatttgcaattcccatcagactactgtgtttaatgtacaaggattatttgcatcatcatcccgatcctcagttcccccctgtgagccggattcctttcatgttggatattaccgagactggcggtcgattttcaggctacgtcattcgatcgtcggatcgatctagtgtccgtggaccttcttgacgtgctcgacggtctcgccctgtaggtcctttgggtcgaccttcttggaagaggtgtcggccttgacgacggcctcggactcggactacgtagtgtcaatttttgatcatcaaatggtcgaacggcgggttgaagggtggtgagtgaaagttgaaaggtgtgtcatgtttgtgacaaggtggaataggacgacgttaggaaaggtgaagaatgttcaaaatcgcgtaagcaaaggatgttccttttctctgctgtcgacccgtccaacattccactcgacgacgccttgccgtgcaccatcgagtggactgtcggaagctccacaagcactcacggccaaagcctcgttccacctaggagcgtccttgtgaggggactggtcctgctcgttggccaagttcttttgcttttccttttcgagcttggcagcgtctccaccggccatttgcctgcgtcaatcgagacaggtcgccagtcgtcagtacgactttcactcgtgatgatatctcgacgggcgggtcgagggaaactcacgatcgctcggggaacgaacggaaagccgagacggtgatcgatcgggtcctcaaggccgaggcctgggcggtgatgggagttcggagacggagagagaacatgctgcttgtttgattagatgctgtgagtggtatgtatattctagtctgtgtgtatgtttgtgctgtagatggtgtctcttgagcgggattcgatcgataatagagtagatggtgtctgatataaaggtggaccgggggggtgaccaggtggtttgtgacgagtctggcttgattggaggatcgacttaggaattaatcggactgatttgcttccgtaaacgagatgatgtcatttgttctcgtcattctcggaagtaaaaaacgcgtcatcatcaaaggctacagcaagggggtataagcgaaactaggcgcagcactccgagaggtggcgcttcacaagaacgacattgtcgtcctgattacaactggctactgagcatcgaaaggagagaagaatggccgtggatctatactctggctcgcaaagtgttcagcgcactgcccatcttgaacctgttcggcccaaatgagaaattgttagtaccattaagccgagctgaacctcgtcggttgcgctcgcgcaaagacaactcaccactcgacctcgcgcgccgtcaaagagtgctcgagttggatgtctagtacctctccatccggtcgttcgattcgtaatgagtgtctagatccaggagcaaggccgcttaggcctattagcctcatcttcacctctgtacgagatggacgcgaacgagagaagaccgtcatttagctcgtagacctgtgtgcaacgcgagaccagggctcacgagtcgggtccgcgtcgattcgatcgtaatccgccttgtcgacgaagaacaacggtaacatgccctgtttcttcaaattctacctcccagcattgtttcgccattaggacctccgcataaagtccggcaagcaacatctaggctcgtccggaactcaccgtctcgtgaatcctggccatgctcttggcgacgaccccgaaaccgcccataaacctcggagacatcgctgctacctctctcgagcttccttccccgtaattatccccggccagaactatccatccttttccttgcgctcgataagatctacgaagggtcgggttcagatgtgtgaattgcttgacctccgaatggatcaactccgagatgtcactcacttggccacattaggcacggtttcatactctcctgtcgttgagttcctcacacaatttgtcttgtcattctcagcattgatcgcaccgatcagtaaattctctgcaagggcatgggagggaaactgagatcgagtacggtagtagctgaacctggaccggacttgcctgagatgttctcaagatggcctctgtatttataccaagggccggctgcagaaatatgatccgtcgctaagttgagaatgggcggggacgggtaagcgcacgtcatcttcgggacgatcacggatccggagaggcgcggcgactcactgcacttccccttgaccttgatcagcatctcgagctccttttcgtcctgcctatcccattccgcaaaaggctggaccaactggatccgatccgaggtgggatcaacgtcgacgactagactctgcctttcttttggcggaggacaatagagggcgaggtctcgtgcgtattcctttggtggcaggacggaaccttccggagcggagaatcgaaatgccgacccggtggatgtgggaatcaggtccgatgtcgggtcaaagtcgagcttcccagagaatgccatcgccgtcacgagctaaaaagtcgggtttctatacgagtcagtcgagtactaagagccgggaggcgcagccggggactcgcctcgggacttgcaacgaaagagtgcgtgtgaggattcccatcctgtctcccaacaaagttcctattgaacgacgagacgattgagttgggcgtccccttttgcatatcaggccgctcccactgtcccacacaggctccacaagcgttggccaagatcgtaccaccggcttgcctaaacttggccaagatgccatcccgttccaaagtcgcccggatctcctccgaaccgggagcaaccaacaattgtgtctgcagagggaggtcggcttgtcgagcttggtccaaaagggaagctgcacgggaaaagtcttcgtacgacgagttggtacatgatccaatgagcgcagccgagatttctcgtggccaagaagcgttggcgtcaacctctttcctaaacgttcggatgggtgaggacaggtcgggggtgaatgggccattgatatgaggttccagctctgataggttctgtatacgacccggatcatcagtctgctatgaatcgacagacaacggaaccagccgacatactatctcgatatgccgatcatactcggagccttcatccctcttcaaatatccaagggcggtctctgcggcctctgcgatccccgccctctctgtatgtcgcaaataatcccccatgctcttggtatagggaaagatgctactggtcgcaccgacctcggctcccatgttgcctatcgttgccatgcctgtgcaactgatggtctccgtcccaggaccataatactcgaccacatgtcccgtgccgcctttgacgctcaagatggatgcgactttgaggatgatatctaaggaacgctaccgtcaatatcagtgggccagaccaaaaactgactgccgaccttttggcgatgaccagcctcccagtttccccgtgaggttgaccccgatcactttggggtgcttgacttcgtaggtcgaacctgccatcacatcgacgccctccattccgcccacgcctatcgctagcatgcccagtccagcagcattaggggtatgcgagtcggtcccgatcatgaaccctccaggataagcgtattgttcgcttcgagggagcactgcgttcagcgcgaggcgctcgattccatcgaggagagagttcagagaagcatggccttacaagatgatctgatgcaagatccccgacccaggcctccagaatgcaatgccgtactgcaacccgataccggtaagaatttctcagcccaatcatgatctcccctacattgaatcgagaccgacctttgcacaagcgctctctaaaaacgcatacacctctttgttcacttcggacgcctcggcgagatcgcgttgatcgccatgtttggccgtgattaggtggtcggcatggaccgaggtgggcactctgaccttatccaatccagccgagatgaattgcagcagagccatctgggcattggcatctaagaataaggaaggaggaagatgagtgatagattgttgcttgtcgttgtcctggagggctgaccatggagtgccactcgctgtgagatggatcagagattgtgaacgctgaaaacatcggtcaagattcctattcatacgcacctgtggctgaagttcaagctgtgaactaccccgtacgagctcctgctctggattggccaggtgtgcatacaggatcttttccgtcaacgttagcggcttgcccagtctgtgtacgtggaccagtctcgaatcagcttccgcaaagcgaccaacggaaagctcaagagacgtacctcgattgaactcttgatagacgtcgttgcaagttgtggtatgacgaccgagtgtctggttccaagggtgaggtggaaaacgagtggggaacggctgaaacactcgcgaaacctcgcgtcgacaagcgcggcagttggcatcgatggccaaagttgcgggagatcattttgtggatttggtcttgatcacgatcgttctgacagacattcctggcagagggacttgtccgggatcaacgcactcatggcctatatgtacgctgacgcccttggctcgtacagctcgttgacgacctcggtgatcgtgacctgttggctgtcgagggcagagtatcgccgacaaacacagggacaaacaggctgacgaccgcctgattggtcggacgagcggcgcaccttacgggtgtacgcggcttcagcgggtcacgacctggatgacggcgcaacaaccaaatacacacggacgaccctgatcgaaaccatttcgaacatttctatagtcgtaatgcgtgcccgttcatcgtcaccgttcaccatcgcaaccattccccgtacatgtttggtcgctcggatcggatgtaagcttcaaacgtcctcttcaacaccgtactccaactcagatccgcctcatcctcgccgacctcgtccatcccgtccttgtcatcgacgttgattcgtacgtcgacgtcccgaggtgtcgcgtcgtctcccatgaccttggccgctcgagccgcttgacgaagcgtcttttcgcccttgatgaagcgtttaccgaggtcgggccaatttctcgaaggatcaaagggcaaccacctgcgaggggtgacgccagaccacgaaatcagctaccgcggtgtcctctgacctggaaggccgatctcggtacgcaccagaaattatgaaagtggtatgagaatgaacccctaaagaacccgtcgtagccggtaggatgcggagctccggccgacaacttgttgtttgaaaagaattcgctaaagctgcaaggcgtgaacgtcatcgagatcagctggtgggctaaagagaaaaagacgctcggagacgctcgactcgaggtggacctactctggaaagtacgggaacggcggtcgatcccgctggtatccttcgaaattgagccacgcggcgtcgaacaaggcgtccgggatcctgaacagcagcttttccagtccagcctctttcagatacgtcgagatggtcattgggtggaaatcaagtccgttctcgagggcggctttgaacaagaacttgccgagcgccgagcccttgtgcagcttgaggacggccgtgttgtacttgtcgtggaaggaccaacgataagcaaattgtcccttccaattccaaagctcttcccaatctctcaaaaagacggtatcggcatcgaggtaaatcccaccataacgatgggtgaggatgaaccgtgcaatgtcggacaggatgaccgacagccggtcatagtcgttttgagatgtggatccgaccttttcaaacaggccgccagcctttttcttgacgatcggtgcggggctgggcgtggcggtgagatccccctgtttctcatcgtccaggacgaccatggcgtcctgttcgctcccctgagcctgagcgtctggggaggacggagctgtcgacgcggcctctgggacgccgtacgtgttgcctcccgaattgaagataggcatcctcctccaatgatccctcagctcgtcgatcccgtccatctgttcggtcgtgttccacattttaaacttgacgacgtcctggaaacgggcatgcaaaaatggtgcgctccacgggttgacggcgagggattcgtacatttccctcttggccgacgggttgggcacggcggcggcgggtcctgggttgatccagacccagaactgaggtcgacaggcgtccgatttgacgctccttcctgggacctggtcgagccctaaattctgggtgaacaggaacgagatgacggccatgtaaggcttgtcggtgaacggtcccgcccagaacatgtgaaagatacgagggtgcgccgggtcgcaaggggatgccggatcgtacaaggacaggttcgggtccagtggggttgacaaccgcaagggatcccgcgacaagcccttttcgagcctgtctaccggttgaccctcttcgtcgagggtttccgttggcaacatgatcctggccaattgctccgtgttcagaaacttgctgggcggtcgggtcgaatggtcttcattgtaaatgtgtgcatagtctgtcaagttggtccgccggagtcgtcgtccatggtcgaggttgcctcctatccgtagatactcgaggcaatcccgtacgtgctgatcgtagtccatcgttatcaccccaagatgatcatcagtcgacggactcgagaacgctgcaccaggatcacgccctatcgggactcaccttgctggtctcgaaatcgcaccgctccaacaccctatccaggtcgatcacgctccccggtacgggtctcggtgggaacccgagcgcgaccaccgagtcgccctttatcttcctctcgacctctgctgcgtctctttgttcttgctgctgtcgttcttcaacctcatcacgtccatcccgggcttgccagggcggtagaggttcagtgagcgtgaggtattcccgttcgagaccgcgtcctaggatcctagggtgggaggattccgagccggtcccttcatgtgtgaccgggtgaaggtgttcgtgtgggggtgtcgccgggtttccgaaattaggaggtaagggtatacttgcgggtgctataggatggacgatcaatcatttaagcgacactctttgcgggaccgtccgaccatcccgagcgtttgaacacggtcggtgtggagccgagattggactcaccatccgccatactaggatgatgtccgctgatgacctcccattcccagatcctggctacctcttcctcggtcaagacgacgttctccttgtcctgcctaaagacctctgtccaacctccaccgtccccgcgtttactcttcttgagcccggtgacgaggagtaccagggtgacgatcaccgcgaggagggcgatcaacctgagcggggtcggccgggagaggaacggtatccgactgaggacggcgtgcgggatggggaggtagactttcaagtgtcgtttcggttgttgtgggtacgctgacgatgccgacgaggggtaatacgacgtcgatgtcgaggcggacgaggtcgaggtggatgcgtgtgggaggtacccttcgtgtagtcgaccatccccgttcaagctgctagaagacgatgccgctcgtctgcctccgaataggggaggtaaggggatgtagagcacggtaaaccaccctgacgaggtccccgcagtggccatgggcgatgtcaagctcgtacgtcggctatgcgacatgaacgaggatctcgtatgatgatcatgcgtgtcaaccgaggagagtggtagaccggaccgtcgaccgccggacgatttggacgacatgggtcgtttcgattgtccaaagagggacatggttttgaggaatgagccttgagcgccaaagtggtcagggatgtcgagccccggaaggtcgtcgtcgtcgtcgtcgtcggcaagttttcgaactggaagcctctggtatttgagcgatcagtgatgctaggtaagccggaggtcggttggcccaccgaggtatgtgtcgtggtcgttcgttgccaagtgagtgagttgtcgatctatccagatctgttttcgcgtggcccgttcgtgttcctcgtcgtcgacgcacaggggtcgagaggtcgatcgtcactctggttttcctggacacccgagctaaaacaccttgacagctttacactctgtcctgacttgacagctaactaggcctaggagtggtgtgtgagtgatcagagtgagtgaccatgacatgcatgacaacttagttcccgagtgcgtgtttacgcgaaaagcgagaaacgcagcgagagacaggccaggcgaacggtgcctagccctagctagattagaagtatggcaaacatcagaggtatgaccaccagcaaccccccacccatcacctaattgacggctctatcctacatgtacatgaactgagctacatgatccccctttcaggcgggtcaaaaggcgataccgttgactgaaaacttaccaagacattccccccttacccagccacctcggtggctcaagattaggcgcgtacgcttaaaaggaaatcatggaaatatgttgaaaccacattcttatgtgggagcatcgagtcatgcgagtcacgaacattacattcagcattcggacatcgtcatgaaatacaactaggtcgagctcgactcgcacatggtaaaagatcggccatccatcctgaatgtaaatgacatgatttgggcgtgaacggcagagcgggttgtccagtactcaaatgtgaattgagggaaaggagcgcaaagtccattcgcctccagtcttattgtacatcgaccgtcgatgcagaacatgactacggatacgctggtggtttttatggcgattgccagttgacaatcgtgatccagcctactcctccaaggtgtcttgtctttcacgggtgcaagcgaagactcgtcccaacctgacgctctcatgcagcctccctatacggtcgattccggcgctcgacctcgttcacgatctcgctcagatcacggacaaagtcgaccccgtcctgcctcagccgttccatctcctccgtctcccgcttggcaccttccgaccagtctcccgggcgtctcaaaagtctcgcctcgagccccgcgctgatcgctcctctataatcactatcatcctcagagaatcgatcgaaccggacaatcagctcatgatggctcccaccggcaatgacgacgacgacggcggcgccagagataatagcgcagactcacgcttcaatctcgtcgccgaccatgatcacgccccgacctgacgacacgttcgccgtccgacaagcgagttcaaaaatcttcttgtccggtttctcgcactcggcttgctgcgagatggtcgtccccgccgtgaagaggtccggtaagaggtctagcgagtgaagcgtcttgactgtcgacgggcgtaatgcgcggttgaggacgatgcggcgcggtggtcatgatcagctgtaggtcagagggtacgaacacgggatgtacttacgaatacgatcgtcggcgttcgagatcaaccccgtcttgacgcccatctccttgagccgtctcactgttgatcacgatggacaaggacaaaacgggggccagtgtcagatcttggctctaccccccggtcgtgtcgaatttgatcaggactggtcctcacggcaaggctcgacatcgtcgaatgtccggtacccatgccgactctcgaacctcttcaagagcgcagggcccaaggctggcatggcgcgttccagatctgccaggattccgggttcggttcgagcagatcagcacctgcaggccgggatgcggtggaacggcagcttgtggacttgcctgtatctgggacgcctgaccctcgcatacattccctgatgagcagtgtccaccatcgagcggggtccatcggtggattagcagtccggccccattccgggtactctgcgttgacgctcttgaaagctaaagacgcgcaagatcgtgaggaatgggatcaggctcgagatcgatcagtaccgttgcacaaaggctcgacgggggtgtaggactgaccaggtttgaaagctcgtttgaccttatccggaccgacgtctagtcctgctttgacggcttcctccgcgtatctattatttggcaaggcgagagcagtcgacgtgctgatcaacgatctgttcgtctattttggagggcgagatgagaaacgagatcctcactggctcactggacatgtataggcaagcgtggagtgatcagggtatctgtcgtgtgattgtcacggtcggcatcatcatcagtggtagtgtgcgtttaggagatcgacgccggtagcagttgaaagggagtagatcggggatcgtaccgaatgcatcaaagagaaccaatcggacgggcgaggtaggtgtcgacgtgagcgtacgtcttgctagcatccttcctagttaagaggtggaacagtgggctgtatcagctggacgtcggggtccatcgacaaaaggtgattgaccatgaatggatatggattcgactaccaactttctgatttagcggtagctttttggggtttgtcacggtcgcgaccaaggttgaacggcagcttaacaggttcatcatcaccttgcaactacaactacacctatctactcagactacatcgaccgtcacagccattattctctctgacatagccaagataatgagctcgagctgactggtgtctttggacacgaaacgatcaatcggcaccgtcgaggacatgtaaagacctcgagctcgaccagcctaaaacaaagaccaacgctcgacgccaggccatggttcatattcctggcctatcgcggccatttaaaacgtcttcacccaaaccacctccatcatcgtcgtcaaatccacacgctcaggatcaaggaacactatcatcaaaggccgagccgggtgccgaggtcattctgggggatgatgtcagtagtggtcgagctgtgtcgctcgagcgcgaggtagatcctagtaccgtaccctcccaccacgacgtcaggacaagacgatcgacagaaaggaccagatcttcaagccgctcaagtggccagaccgccgtgaatcgtcccaagtcgagcttggaggcatctcgaagcagctcgagctcacctggcccggtctccatcactaaggacaggccggtcgttggtaaaagagatcgaaggagaagcacagacacggctttgtcgtcacccgttgcaggcgagactgcaaccaaagcctcgggttccgacctgaccgatgacaacaaggtaagccgtcactttacgagatctgaaacgaccggcagctcgacctgatgtgcttatgacgatagacgcccaaaccgacaaagcgattctcgtccctctttacggctcgagcttccacaccgagctcgcccccttggtccgcttcagatcactttcacactcctcccgagagtccagaacccgtgaccgccgtatcacatagcgactctacgctgcaggctcagcaacaggatggttcgatcgagggcaggatgttggggatggaacacctcgtcgaggatcaaggatggacaccccggggtcctctaccacgacggacgtcttctctcggtcatgtcgaagctgtacatcgaaccggatcaaagacctcggacctgcctgtcatcccttcagagaagagtttgcctttgatcccgcccacaacacctcccaccaagccagctcagagattacctttccctcctctctcgccaacaaacaggcttactcctcggacgggccgtgcggtgtcttcccctcacaccaaccaggtagcgggctcatcgacgtcgaatcgagaagcaagaccggcgcgtccacaccacacgcattcgcactcgtcttccatctcgtcagcgaccatgtccttcccgcctatgccgaacgggatcatcatcaccccttcctcacccgccaacgatcttctcgcttccgatcgatcgcccggtcgacaacgctaccatacggtcggtcgggctgggagcgagagcgccgcccggtttagcctaggtgaggtgctcgatcgagctgggagtcgggagagccaagaggcacgtcggttggggaactttactagtccttctatcgctagtggtacagctaaattggttgaggatgataccgggaacgatgccgagggcgatacgagtgacgaggattctgggctcaaaaggtcgaacacggtccggcctctgaaacctagcaagagcaggatgagcgaggaacatcgtccaccgtcgactggatcaaccgagtctcgacgtaaaagcatcaaaagggggaaagtggatgggttgaccgtgcctcttgccgagccattacctgtcaaccttgatctcgctactacggacgaagaggggatgataccacctccgtcgacgaccagccagatcacgcgttaccccagcttcagctctggacgatcgccaccacgaggtcgactgagtccgcacccagtcgacacgcatgcggcggagacgctccgatcaccttcaccggcgaccagcgccaagtcgatcacgttttccgagacggccatgctagcccccaatgggccgggaaagcaacgctcagcgtctggacctcttcctaatcagtcggacaaggatggcaagcgcaagggaaagggaaagaaggtttccgatggtagcctgtcggattcgggcatgccgagtgggaggtttgccaccctaggcatggggttcgcagcgggaaagaaaaggttgcaaaaggcacgaagcttttcagacattaggaaacgcaccgaaatggagaccgatgatgaacgggttgaagcttcacctcggatcaacatcaaagatactgaacctagacaggaggaagatatggaggaggtattgtctgtcacgccgccacgtgtcgaggatacactaggtacaatgcccgagcgtcatcaggtagaacaatcagcctcgaccgcatcggccgctgcaaacgacgccgcctccgcccaaaagaggaaacgcagcgggagcgcaggactgctccgatctgcagctggatttttcggtctgcgtaaggacaagaaggaggacaaggccaaggataaggacaaggcgaaaacgaaactcgtcatcggcgaagtccccaaggttcaacttgacgacactttgcgacctgatgatgcagatctagcgcctccaaacgctccaggactccaggttgcagcctcgataccaggttcgccagaaaggaccgctcgaccgctctctattccccggccttccacaccctcgcgcgctgccacccttgcttcatcgttgaccattcgtcgcagaaagcgcgatcacagtgcctctcgatcgttgttcacgcccaacgactcggaaggtggcaagacgcccgtcggaaacacatctcgaatggcaggctttggctactttgctaccatgggcgggcactcgagcggttcatctgcggcggtgacacccgtcgacgaatttggaggcatatcgacgccgagctggtacgactcgccttctagcgagaacgtgccatcgcgatccttgcagactgccccgcatggctcattcccaaagtcgagtcaatatccaggctcacagtcaggtcggacgttggatttggattccgcaagacgaagagcacagtcggattctaccaaccttttcgatgcgcggacgccaatgaataagcaacccacagaccgcgatttcggcaagctctttgacggccgaagtagaccaaacctcggatctcgctcaaattcggccaattctgacgtcgcggtcaaagagaaacgcgcgctcacagcagccccctcgatgcgaagaggcaggagcgggagcttgttgaaagacgctatggcttcggcagcgactagttcgatgatgagcccacccttgacgccaaacctcgttgtatcgcccaccgcctcgaccgcatcgttggtcagctccttcggtggccggatatctagacaagctagctacgatgcggccatgaatagtacatcggatggcacggcagaacgcttcaggacgccctctcgacgcaatactgccatgtccagttcgttcggcgacaaaggtcttgcctcggtgtcagaacaaccgccgcgtccgagtgtctcgtcctctatcaattcgtccatcggctcctcttccgcctcgaagaaagcatctcatgggccccttgacttgctggacgtgcgctcaatcgcatcgtccggctcgtccgggcgaaagcggtcttccaccttgttttcgaatccgccatccctcgtccatcaagccgtgcccttcagcagtcccacccggcaaagaccccaaaatccaaggaggttatcgaccgggctctttggcagcacttggagcagagacagctttttcccatctcctcagtcagggcaagagcttgcatctacggtccgaagaaataaggctccaccggcactacacgtttcaaacgagaaacgtagcgcttctccggcgactcctgcggtcggtaacgacgacgacgcagaaacgtggcttggcaaagtcaagaacgcatcccggcgatcagacatcttgtataccttggcgtccaggtaggttcttcgtaccgtcagaatacatgatctctctggcagctgatggatcatctcgttgccgatctagtggagatgcgatccacatcggggctttgaacgtgttcatgcgtgactttgactttgatgccgacgcgctggacgtagctcttcgaaagctcttgatgggagtcagtcttcccaaagagacacagcaaatcgacagggtcatggaggcctttgcgaaacgctatgatgaatgccatccggggttactgaaagatcctggtgagcagcccgtatcgaccgtcatgttcgtacgcatcaagttgatcccgtaatcaacatgctcctagacaacgcctatgtcattgcgttctcgctcatgatgcttcacaccgatgttttcaactcgaacaacaagagcaagatgagcaaggccgactatgtcaagaacactcgacttgatggggtgcctcaaatcgttctagaggtgagctcggttccttacgcgcaatgacgacgagaccagactgttgaatgcgtgattacgccagaccttctacgacaacgtctcgtttacgccattcatctacgtagacgacgaagaaccgcccaaaagcgcgacgtcatcgacaaccgatggcatgtcttcacagcagtcacgtaaatcgaggtcggacctttacgattggatcagatccaattcacttgcgagtctccggatcgatgtcgagtcggtactacctcaggatacgccattgtcttatatcgggacgagaccgttctttgatccgtggctgccaaaggaagcctttgcttcggcgccattcatcgaagtagtgaaaccgaagcctcgcaaaaagtccggtgcgactctcctggtcaactcgacaggcccccctcagttcggcgcggtcgacagggaagatcccatcgttcgcttaaaagttgcaaaagtcggtctgctcagccggaaaggtgcgtctatctgtcatgacaaacttttgcagtctcggagctgactcgacggttcaaactagacgatctgcatgaggaaggtaaaaaggcgtcgaatcgcaagtggaaaagctggagcgtcgtcctcactggatctcaactgatcttcatcaaggagcctacgtgggcgctcagtcttgccgatcatatcggtcagctggccgccgttggagctctgactcccggctacttgttatcgccgcgattcaacaatttcaagccggacgaggtgttttcgctgagttcagcggtggctatccacgaccgcacatacgacaaggtaagctttgtcgttcgtcggagttgcttcgctgtaaaaactgggcgctcacttggtcacgaatcttcagcacgaattcgctttcaggctgctgatgccctatggctgccagtatctgcttcaagcggcggacgagtacgagatgaacgaatggatcagccttatcaactatgccagcgcgttcaaaacggcggacatcccgatgatggcgcctgtgtatcaggatcccttgacatccgcctcatccagcaagcgcaactcggtcgtcgccgagacgaaccacgatacccttcgttcgactccgacggacgtctttggggagaacaaatcgatagaccccgcttattctgatcaattgagcccggtagcctcatttgacagtaggaggccttcttcgtctctcttgacgtggccgtcagctgaagttagagatcctggatcgagactggaatatttgagcgtgagtctggtcgacatgccgcgtgccagagagccgcttctgagtcgactgccattgcagcgccgcgtttctgggttcaggatcaagttaaatagcctccaccaaagcctcgaggaggaactcaggatcgcacggaaccttggcgtcctcacgccgtttcagaggacgacgagggaggccgtcgagaccgccctattgcctaccgcggccaacgtacgacatcttcggaccgagatatgtaggatcagctgttgggccgaggtactcgacgccgagacgagaatcgccttgcccgccatgtcgagcggggctggcagacgtacgcccaaattgacacttacccgggaggacgatgatcagcctcgtcccggagataaggttccttcaagcggatcgatggtcagcggagtgtggagcgaagatttgagcgcgagtctaacggccatgattccgcccgggaagcaggaggaagggcattcggaggaagctggtcaacgagcatcgacggaagcgatgggctagacagacaatcagtcgtttagatgcatgacacagacaacgttgtaagggttggaatgtgattgtgttgtatcatttagggaattgaaagattacgaccagactcgcgggtcgatgggctgaactgcccgaattcaattctccccagtccagcacgagcgaggctaacgctttgcaggcaagcaagtctacagtgagtagcggcctgtagccggtgaccacttctacctacgtcgtgtccggagtgccttccggcaagcctgtgaaaagagtattcaccagtgaggtgttcccaagccaatgcttccaagcctcctccgagagaggttcatgatggtattgctggagcgcgacagatcgaatgtattgggaaacatgtccctttgcttgcttgatgtatggcataggggagaactcgaatcgctggaatgatgtcacgatggcagagaaacgacgttgcctggccgatacccgggatcgcccaccgaatgtatatagcttgagtgccgggatggcggaacgatctttttctcaccggtgagcgggcctgcgctcgattgacgggcccgacgattactcgacgtccgacttctccctgacccgtaaccgtgtcaccatgatccattcatcgtcatctcgtcaagttaccatacaaatttcgtttccccctttccgtgctaggcggtgacggaagccgatttcccgtcgaccaacttttcagcctcggcgttcaacctgacgctaccgtcgtcctcgagctcgacgtgagcggcgtcgatcttgtttccctcttcgtcttcgaaggctcggagtccacggagaccccacctgtcgagcatcgccttgtcctcgtcccatccggagcaaggggtggtgagcatctgttcgccggtaaagatggcgttctgcgaggaaaacgggaagagagcgtcagttggatgtcgacgtgagggaccttgtaggcactcgagactcacggcacctgccataaaggcctgatttgtatggggaaatggatgactccggtatcagcaaacgctcgtgaccgaaaccatcgagccgggggactcaccatggcttgctcagtctcgctgaacgtgtgcctaccggccgccaaccggatgatggtctttggcatgacgatcctggccgtcgcgatggtcctgatgacggcgtgaacggcgacgggctgcatggcggataggagtttgagcacgtctgcacccctgggttgggatatggctcgagagtgggcaggggggactcacgtcgttcttctcgagcggggtacctgggatgggtacgagcgtgttgacggggaacgactcggggtgttcgggtaacctgattcggtgggaccaagcaaacgacggatcagtccctcggctcgtgcggaacccaacgtcgaggctctagcgggacgactaccgacacccaccttccgacctcccaaatcaatccgaccctatcctcgtctttttcccccaaccccaagatccctcctgagcagaccttgattccggcctctcggacggctttcaacgttcccaaccgatcgtcgtaggaacgcgtggtgatgacgctcgggtaaaattcgcgcgaggtatcgagattgtggttgtacgccgagagaccggcttctttaagccgacgagcttggtccggggtcaacatccccagggtcgtacagactatcatgatcgagcgatggtgacgatcagcctctggagcacacattccctgaccatacgggaccccgtgtatggggataagtggactcaccctccatgcccatccccctgacctccctgaccatgctcaagatcctctcgaaccccctatccctaccctccaaccctctccaagcggctcccatacagaacctcgtgctcccgttctccttggcctttttcgccgcctcgatgaccgggtcgagtttgacgagcggggtggctttcgtcggggtgcccttgtggtaagtggattgggagcagtaagagcagtcttccaggcatccaccggctggcgcaaggtgcgaggttgaggggagagatgggggttagtcgacgttgacggcgcacaaacggtgtatgagggcggacagggtgaggaagggggctgaactcactcttgatgttcatcaaagtacacaattggatcctagaggggtcgtggtgcatcctatgaacttgagcctggatttcgggtgagagtgccagcgagagtggagagtccgttcgaggttccgcgggtgatgatcgttcggggacgatgagggtgacgatcgtatcgaggatgagcaacaacatcagaatcgtacgttccggaccggcgaggtgcatcgatcggcgaatgagagggaaacgaagaagacacataagaatcatcagccccggacctccctttcaaccctctctcacccgacactcaccgctttgaagacgacctccatcaacggtccatcaaagatctcctgaacctcatgtctcaaccaattactcctgacggtccccaactcggactttctggactttgctttgaaaccgaccgaggtcgaggtcgagctggaggatggacggggtgcgtgcgggtgttcgatagccgtcgctagggaacggatcgaagcggggagagttcgtcgagctgccatcttgatcgtgtccgtcgtgggtcgtcctagtaagtgtaatgtcctgtacgaaggacctacaagtagtgacaagtactatgtacgtacattctatacttgttactttatgactttgctcattctcttatccgatgaatccggttgggggagacggcaagtcgctgggggcggaagcaaaagtatcggatgtaaaattggaacgatacctcctttcggaagcaaatgatcccggtccgggggttgcggataatcacggagcggcaggcgaagcagggcatgttgacgggatgatgttatggcgatgaactgctactaccaagctagcatcgtactacttgctgtcgtctagtctacagtgtcatggtgtcatgctagtcaggttggtacgcgcaatcagaagtgtccatgttcaaattgcagtggtacactgatagtaggagtgcctcgtctgctgtgcctgcgcgtggacaagtagcaaacgatcacgatcaactcctcctccgttttcgtgttacacgaccgtatcgaacgcacacacagacaacatgtatcatacacatcatcactgatcactgacaggttacagctcaagaattatggattgtatgatgaccatcatcgtcgtcgttacattcaaatatcgacgctggatcggatcgctttcccacgcgtttccccttagtcacttggtcacttcagttgctaattgtcaacaaacacctacttttgatcacaaacaaagcatatccatgtcacatcatcagctcatcagaccaccatcgtctactagctacttagctacttggctacctactccaatctagaccttgccgattcaaacactctgcgggataaatacaatggtcagtaactccgtccatccattcaacaaccgagacgacaacgacaacaacaataaagaacacaaagatagggggaaagatcgctgatgctctttcaatctcttcttgttacaatcacaccgaacgatggccggccactcgattttacccggttgatcccctcattccgtgcggatgatcttgttcgtggactatcgttcacttttcgtttgattctcccggtgggacgctgtggactctgggatggaactacacggcgtcgacgcctgatgattgatcgatgcacgacccgtaaatctaccctgggtggttccggttatgtaacagtcggactcttcaggtaagccctgcatgttctcccccgcctatcatcctcgagccgtccatacgtgcctaccaaccgctaaccccctcatcccggattcgccgtaacgcagaatatcaagaagccttcgctcttttcgacaaacgcgggacctcgcgcgtaccccgggaatccctgggtgaattgctccgatcgttgggccagaaccctactcagcgggaagtaggcgagttgagcgggaggttgggagctacgtgtgagttgtggggtttgagctgggatcgggattgagatcggatcggggtcggagttgagaagctgatcgagcacgggcgggggtacgcgtttttgggaattatagtcgactacaacgagttcctacagatccttaacaggcctgatggatggagacccgctggtaccgagggtaagtcatgcccaatactccccccctcacactacagtctatcttgcatcacctctcacccacgctgaccccttacccgcatccgcatcctccggtgtgtccgccaacatgactttcacagaggaattcatcaagggattccaagtgtttgacaagacgggtaaaggacttatcggagctggagaattacgatacgtcttgacccagttgggggaaaagatgtcggacgccgaggtggacgagttgttgaagggggtcgctaccgtgtgagtcccccctggggtcatacgcgtgtctcttgttcggatgtcctcgtccgggctagagctcgttagcgagcgcaggctgatggttgttgcgtcgtcgtcgtcgtcgaggcagagacgggcagatcgactatcatcaattcgtcaggagcatcatttctcaataaacgcctaccggtcgacccgcccggatcttaggtcttttctctgcacgcgagaggattctactcggcctgtgtcgcccttcacatcaacaccgccgcccgccagcatcatcttgtgcctcgttggtctctttttacgaacgactgttgtcatgacaactacgaatatccatctcattctgctgtcatacgcatcgagctggagtcgcagttcggaccatgcacgaccgtcgattccgagtcatgggggagttcgttccgctcgaaatcgggcgtggatttacgagttttcgcgacctcgacagggccacaatcaccagcgagcacgtcaagttggaggcgcatggcgtaacacttggtcgactactgtcggcgagtcgaccggtgctacagttgagctagccggagtcatccgagtgcgttatgagattagctggtacatcagggtgtccatgcgtcagctacgggcgctcgctagcctacacaggaagaagatgagagactctcgccaaatcagtggggttcaataataacgtatgtcgtccttgtgaataaccatgaccctgtcggtgccaaagccttgatcgatcaagccctgcaagtctcgcttgcagggtctacggcctccgttagaatacacggggcgacgggatggtcagcgaacgcatggtcgagaccatccgtccgggatattgacctgtgaatcgctggcggggctcgtgaaacacaggttcccgtcgcgcgaggcctggtttcaaaatcaaatgtccccttgtggaagtgaagcacgtcatgtttgatcgcaagcgccagctcttcatcaccgtctaatctgtggaaaggtaagaaagtcagacaggcccaagccatgtctcgtcccttgacccgcaaagctgtacgactgaatgatgagaaaattcctcgaccccggccttgaatgacgactgattcctcgcccgtacctacataggcgcacgtcggagatcaccatagtcctctaccttctctttgtctaaacggttatcaaccgatcccgatgactgaactatatacccatatacctattcaatacgatgtcctttactttttcaaacaagactcgttgatcatcggacatcgccgaatgtcaggacgagacgggagctagagttgaactcttcagatcgatcaggtcgactatactcacaacgaactagccatctccgccccacctctccataccgccagatagacccgagcccataaacttcatacacggttcctgtgagccatgtcagaaaagtcagacttggccgatgcggtgaagccgaaacccgtgccgtcgactcgggccgcaccaaggagaccccctaccaccccaccctcagcgactatattcaccccgttcaactttctcttggtcaccggtctcgcttatctcttgttccaatcctccgagtacaagctcgatcccaccgagatctatcaaaagggcctggaattgttccacggagctggcggtacgaccgagttgtcgggattgtatgccgtctgctctaaagaggggaaccagatctacactagcgagttggacgagccgcaagtccaatgcgtattggtcaacaacgacaccattataggcctaggtcatcaaggcgagttggtccactctcgcatagtcagctgtcgacctgctgacactggtcatgggcaacgatccttgcagctcacgtggaggagacggctgcgtcgttcaaggccgacttcgccctaaattcgaaaggtctccaagtgcattacctttcaaagggagatattctgacccctgtgagcctgcgaacttctcgttcatgcggttcctttcagaagagctttcgctgacactcgtttggatttggcttggagctatatagggattcaccgacgctcatgcccacgtgagattttcagtccagccttgatcacatccgctctcgccgtgctgacacacacacacacatcaaccctctcagaccttgcaatacggccacgctcaactgctgaacctggcaggtagcaagagcatcgacggtaaaattctttcacacgacgctaggtaccccagcgcatcgagactaaaagatgtgtaccgtccttgattctgcatgcagaggtaatccggcgtctggaactatatgtcgataacaatagggaggccgtggacggaggagcctggatcgagggtcaaggttgggatcagacattgtgggaagtcgaagagttccctactgccgtgagtttcggtccgacctggctgccccgaggtcccagagaccttaagctttcgtcatccgcaggccgactttgagagatctaccaaacttcgaggactcccgatcgctctcaagcggatcgatatccatgccgaatgggttagtcccaaaattctctcccttatgggcaacctccccgcgtccgtcgagggcggcaagatcatgcggtacaaggataccgatgcgcctacgggggtattcctggacaatgctatgggtctcgtcgaagaggtcagaccacagtggacggaaacccagatgaagatgtacctagataggaccatcgaggatgccgtgcgcaagggtgtcacggggattcacgatgcttacggcttgccggagcatatagattttttcgaaaagtgggtgaatgccccatgtcccggtcgcgcaaacgaaacgactgatgcgcatcacgtttcgtttttgttgggaaataggatggccaaagagggcagcttgccggtaagccaagttgatgctggcccatctcggttgatctctgctcactccgttgactttgatttgcgaatgcgaagattcgtttctatatcatggtgagcaggtcatgagcaaaaacagaatgcggcattcctgatcgattgggatgattgccagcgaaaatgcccggatcgcgagaaatactgtggtgatgtcttgcccatgatcgataatgcgggaggtgggtctggctgcccctactcaaacattgctccgaattgatcgatgcatgcttgatcaggcggcaagctcaatgtcaggagtgtcaagctcttcgcgtaggcacatggcatggtccggacgagcatacaaattgaccccctgtccttcccatttcaatctccgcacagcgacggcgctcttggatcatggggtgccgccatgctggaaccgtactcggatcgacccgaggagacggggatcatggtcactccggaagcagcctggacaagcttgattgacgatttcgtgcgaaacgtaagtgtgaactttccggcttctgcaaatataggtattccactgctcaactctgaaccttcatctcccttagggctggcaaaccgtaagtcgacgtcgagtagatgtcgtaccatgttggatgtcacaactgaccaaatcgatggctgtagaacgtgcactgtattggggaccgtgcgaaccgagtcgtcctggatgccatggagcttgcacttaccaagtatggaccggccgaccgccgattgcggattgagcacgcccagattatgacggaagacgatctagccagggctgtcagactgggtggcaagtcattttacttcgatctgggacgtcgagtcactagtattgatctactcgccctcgatttcttcagtcattggtagttaccaacccacacatgctacgtcggatgtgagtgcaattcgttcgtcccgactgacattacttgtgacttaccattcgaccatgtagatgtggtacgctgaggatcggattggcaaagataggctcaagggcgcctatgcttggcaaacgtacattaagtaggtcttctcgccttaaatcctcaccaactgttcgctgacgggccgatggcccatcgtgcaggctgggtggacgaatcgcgctgggctccgacttcccggtcgaatcgattgacccattgaaagggttctttgccgctatcagcaggacgaacgaggaaggcgactctccgcacggccgcaatggctggtatgctgaacaaaggctaaacagagagcaggctttgagaggattcacaattgatggtaggttgccattgctgcttgcgatgtctttttagtatggtattgactggacggactcgtcgtctcaagcggcctacgcatccttccaggaaaatacgaccgggtcgttcagggtcggcaagaaattcgatgcggtcgtctgggataaggatatcatgcgggtcgaaccggccacttcggtactccaggccaaagtcaaggcgacaatcgtggatggcaaggcggtctatggttcgctatgaagtaggatatcatgaacaaaaaaattcatggtgtaaatacatctctgctgccgaaaaaaaggacagcacaagcggaaatctgcgatagttgacaaggactggtctagattatggagctgggctgttcttctttcacgtttagaatcactgaattccagcagctcggagttgagagacggcaaagttgatggactcggcctgttgaggggacctgctgtatccaagatgcgcgacgagggacccgattgaagtgcaaacgttgtcgcctcggttgcagacgtcgcgggtctttgactggtaagcagctggcgtcctgatgccgaaagcagcagcgcttccggacccgatggtggcagtgcccgcattctccggctgtcccgctcgccagtaagggctaaagtttgggattgaggtgatcaatacacaacaatctcatgtcgaatgtcccgtcatttgactcactttccgtacaaaatggtcgcgacgaccgagtcggccggaagcgcattgtcattctcggcagtgacgaccaccatcgcgccttgagagtaaccgaccaagacgaacttggtatcaggacagctggacaaggtgctggagacgtggctgagcaagtctcgagctccttgcctgggtccgcccacaaagtcggcgatagctgaacgcgatgcatttgggtgtcagtacaatttctaaatgacccggaaagttgatcaaacctaccaggataccggacctcatagtttttgcctcccggaacagcgctcaaaattccatcgacagtacctcggttcccactaggaaaggcttgaagttcgcctgttccacgggccgagatgatctcgtagcggctgcatcccccgctgctggcacctccgaaaccaggccatccgaattggcgctcctcgatctcgacattcgaagctacccgaaaacgttcacaagtcagctcggagggtatcagtcagcttcacccgtgcttaccgagaggagcagcgctcgtgaaggcagtcagagtggaaacgatggcgaaaagggcagcgaaagcaaccatgatagttagactgatcggcaggatacaatgactcgaagataaaatgtgtggaggatgccttggttgttttgggtagcttgtaacctagaatcgagtagactcggtatatatacacgtttctaaaacccgacatgcgcagtccctttccttcatagccggtcttaccgaaagaaaaaaagggacctctgaagcgaaaagatcaagcctcctgactagtgcagtgtctcggcaggccgcggtacactgtgaaacgcgcccaccatggtcgcagttgacggggacatctctaggctggcgaggcggttggacgacgaaatttgagtcgtgccctgaaggcgagcgctaagacagacacgttgtaccttgttccgcgctaagttgctcggataaaacggtcttcagtttcacgtcgttgttgctagccggaccgatatgtgacataagcgggacgagggatctgaaaacccggttgttgagtagtggtccttctatcatacaaacgcacgctcgtgacgaggggtaagatcgttatgctatcaaagaccattcgcggcctgtcgcggaggtgcggatggtcacggcggatttcccttcgcgacatccgtcaaccagtcgataatgttcgacctggacctgagtcgcctgtgttctggccctgcttgatttggaggcaacgaatcaaggaccactgcgtaagatctgcagtagatcgaaagtacctgttcggcgtaccccaggtagtccttcactatgtttactccatgtgaagaccgatcaagcaatagctcttccagcgtgacgtgggcaatcgcagcccgcctcgcttcatacgcctcgacgacgctcgcactctcacgaattacttcctcggtgatgatgtctggcatacgcctttccgacagtatgagcccgaatgtctcctcccatccggatgcccacttctgttctgggttgtgttcggctacgagcttttccagggtggcaatgaccagaccttccacctcgagcgtggcatctgcgcgatcaggaggcagtgctacatcataactcgggtcgcctccttgagcttcctccgggaaagaggtggctgtcctgtcatgaatcacgtctccgacagaggaccgatccaagtcgagggtaatctgaactggttgatcttgaatatcctgagtcgcctcatcgtgtctgccagtcaagacagagtcaacacgactgcgagatttgctatatgtgtattcgggggcaatatatgattcaaccatatcctaagcttgcgacgtgtcaggatttaaacccttagaggggcgctcttcggcaccctggcccgagctcgattgtcggtacataaccttttatgattcggcaagcttgagatctcgattatttttcttgaccaccagaagacctgggttgagcatctcaccttgcgttgcttcttgagaagctcaatgggctgcttcgcttcttgcactagatgagaacagggtgctacttcaagtattcagcatacaggctctaggtgtcgcttgtgaagctgcgaattcgcagaaaggagcacatgcttcctgaatcttaatgaatcgtgtcagatcgaatggcctagcttcattgcccagtcgatgagcggctctgtagattctgagcttgcgggactcgccgatattcttgcacgcgacgagtagctcttggtacaattgatttggtcatgactgtttggtcgtcattcaacaattcgaagcctactagtacactcaaagccgcggacctcgctacagagtcaagcgaaggagcccatctaagccttgtttccagacggataccagcaatgcactttacctcttgcagtaggaaccgggcaacgagtccaagcctttgtaagtctttctgtcaatccctattgagacaaggctagctttgtttcggtagatcatgtatttagctcaatgcacacacgtggatcggcatatacggaagggagcacaacgagctacagccacagtttgagtacaacaaggaaatcacgctaagtcttcaagctccagaccaggagtcccaaaactcctcacatccaatcactcttgttcgtttgggccggtcccagaactgtttgggaggcggcgcgagcatgaactttatgtcctgagagtcgcagaatatcgcaaggactaccctagtgcgctccgtccaacgaaaggcctcgcagaatcttttgctgttcttaggatgaagctcccacttgacctttgtcagttgctctaaagtgaaaggttccaatgcatctctcagctttcgaaaatcgtccacggctctcctggacagatagtcctggacccttgctaaggtccattccatgtactgcgacatcggacgcttccgtgagaggatctcctcgaagagcgtatcccattccgcatgtacttcgtatccgattgatagcttcagttgcttcatggcttccgtgacgaggtgcttgatcccccaatatcgccggattcgtttgtaatcatcttcgtcagcgatcgaaacggacgttataacgatgtcattcatcgatccagcgatctcggcttgcgagattcaatctcttacgctatcctagatagaggtagcgcttcccgccatggtttgatcactcgatttccccgaagtgaggtttaccgtagaagagaaggcccgtgacacccaatcaggaatttcggtcaaagtgtaaacgctcatagtctgtttattcggatgtgattctcagatacgatcgtctgaatcactaccagtggttgtttcgacacatcgcatccttgaattttgcgatgggaatgctgagcgttcttatagaactacgctgcaggcgcttcttcgatggcaacaccgcaccacaaaggaagggttacagatgaaacgcgtcgcgtgagacgcgttcgacgaggcttgtggatgttgtccaactagaagcgcgtgaatcgtgatgacgcggtcaagcgcaaatggcatggcaaccagcagcagctcctgtcgtcatctcgctccaatcattcatgcatcaatcgtatcatgaagatgtccactctctgtacaattgctacatagactttatcacacaaaaacacgagcagatttgatacgaataatcatgtccaccgaagccaccaccggagacaagcgaaaggccgacgagcagaccgtcactgccaccgatgacgaagccaaaaagtcggtcctcactccgctcctgctggctggatccctgtggaccaggatcatgtactgacgcgggcatctcgctgggtatcgcaggcaaaagctcggcgatgaggccctgaccaaggagtctgaagtagacaccaccgtctccgaatccaacatcatccccgagggcaccgagaggagtaccaagcccgccgcaggagagctcgccgagcctgaagacggtgacgaggagaacgctggcgagaccgctgctacttctggccaggaagaggaagaagaggaagaggacgatgatgatgacgaggaagaggaggaaggtcgacgaccccgaaggagggccgctcaaaaggccgagggttactacggtgtaagtcccgcatgctctcacatttggcttgataagccttcctcgatttgacctgtcgaaacacgggacctgatgctttcgttattgtcgtttcttagaccgacgctgccaaggccgctcttgggcgtgagtaccctaacgacatacttcttgctcatacctcacactcggaagcttacggctatcccgctttcttttctcctgccctgcatagccaacgaccacgacgacgaggatgaagatgacgaggaggtccagcctggtgatttgactgggatcaccgagggcgatgatgatgaggatgaggacgacgacgaggaggaagaggagggtgatgacaagtagatgctttcacgctcgcgctagacgtccgagaagacgaggtcagtggactggaactcggctcgaaaggaagaccgcagtgaatatttggtaggctgactgttcgcggacgtatgcgccccgatagagaacaccccatgtgtagttgaaacaaactaagttcagtcaagttacaagaaagaaaacgaacgccgttggtggtaatggtcgatattgcgatctagctggatgagggcgtccaagacgccctcagttgtagatagatatcttgtcccaaattcaatcgaaagcaagtaattcaaagtccgggtctatcgctctggatcactatggcgctggtagggcagatgaacgctttacccgtcgcacgcatcgcctctcataatcgcctaggacgcctcggtgcgtagtgagaattacatcgataagcctgccaagctgtccatccccatgcctcccgctcctcccgccgaggacgatttcgaagaggaagacgctttcgggtacttgaaccacgtcggcaacgtcttgggtacagctccatctccagccaattccggctcgtgcgaagtcatcagcaccggagcgttcccatgtataggcgcccattggagaggttccaacccgccgccctctgtcacgcgtgcgcttgtggcttgagcacgacgacctcgctttactttggaacgatgagttggacttaccggtcgggttgtacatgtacgacaatcccatacccggagcctcttcgctcggtttctcctgcctgagcgctcttggccttttctccgccttgaacgtgctcttcttgccttcgatgaggatgcgcatctcgtgctgaaagatcgagtacatgaatggaaccaacgcgatcatcgctagtcttttactggctgtcgaaagtttcgaatcggagggggaataggggtcttcagcgaacgatcgaaagctcgagatgcagggcagaagattcaccgaatgctaggacggctatcgagctgaggactttaatgtgccagattcgatgctccaacctggcgggattgacataacgtcaacgcggacctgaactctgtctgggccgcgttcgactcacactctcttctgttccgtgtagtaatcgccgcgctctttcttggccttgtcttctttcttgaggcgctcagacactatcttggtagcagcctcgcggcgcttcttgtcgtatgcctgcgatttagacaatgacatcaagggcgctgccgcgaacgatggcttgtggggtgaagcattcttacctcgccgatttggaatcgaccctaaacatgcaaccggcttcagcggtcgctattcgaattctgggcattcgactcacgacgtggggctgcagcccactttcccagatcatgttcttgttctccgcggacgccagccctgtcggaaacgggaataaccggggctgtaccagagacgtcgaaaggaacgctaggggtaaaccgccaagttagcccccactgattcgtttcctccggtattcgtacacaccgctaggatgtgctcgcgacgccgtgtcctgaacgcgaatcaacattaacaccccatcttagctatcaacaactgcccaggttcaaattacatacccacagagagaatggtctatcagcagagttatgtatcagtgctgcttttctcgaaaactttgcccgcatcttacagtttacgagagaaatcagtctctccgtgattgaccttcttggtttttgatgccgcgatctgcttggcgttccatgctttgacctcggcctcccatgcccaactgacatacatccgatggcagagaagtagcctaagccgtaggaatagacgacaaagaaactcgatgagcgatgagctcccgcgaaggccattgtggagaacacccacacgacaaccaatatcgtggctctcgagaacatcaagtagaaatcataggcctcgggtggcagattttcgatggatgacatccaaagagtcgtgcccaccatgagaaaaccggcgacttgccatgggccatattcgaaactctttgactcgggcctcttctccctatgatcacatgtggcaagtcagctgtgggcgaaagacgaggggtccgtcaattcacgactcacgtagatggtgattgtcccatactggcgtttttgacaagatcctgtgattgtcgctgtatgttggtcaattatgacagatattgaggtgtaggacttcgataatatggatcacgaatgccagccagactgaagatccaaatctgaaacgaaaccgcggcctcctttgtacccgattctagctaagacgctgacgtgtttcaactacttatgcccgttgggtacgggcaaaagacgcgcgctggagctgatcatcaggtcaatccatgacggcctcctttcaggaacaaggagaagaatgtgaccacgtttcgtacgttgctaggtctgtcgtattaagtctagactgcgtcttcgcgcagtatgttcgagcgtgcttcgtacggtcgaaagtggagaaagtcataccccatccaccccattccttgacaaccatctgcaactctttgaagaaactacgatcgatcgacaccccgcctcccttgtctcagccgtccgcacgttcagacgaccatgttcagctctcgtcgaaatccgacctaccgacaatcccgctctggcggactctttgggtcgagctcgtccacccctcacctgcgtcctccaaaaggatggaagatcgctcttatcgtcatctccctctccctgttactgttgatcgagatcgtcgtcgtcgtgccgatgttagacccgtcggtaccggggatgacgttgttcacttacaagaccggggacgggagggaattcgccgtgggtagttgtcaaaccggggacggagccccaggggtagagaacctgccgtgagtattgtgcgagtaatcccgatagcgcaagctcttgggagcttttgagctgaatcgatcgaggttttctcagctgcatcgagagtctagcgaagaacgacatcgagggagggttctccaacgtccctgtcatcctcaagttgtcctctgtctggatcggagtctttatcggctgtctcttcctcgcggtggacgcatggaccgggttgaggcaatcgcaataccagacgcagagttcgatttatggtcaacagagccacctagctggacaaatgatcgagtccaagaagggagtcttggccgtccatatcgtcgtgggcaccgtcttcttctttctgtggttgataacaactatatggacggcgagtacccctggggtcggggctcagcctttggggatagcgtgagtcaagactactactaccgccgcctttacgaatgctcgttgcatgaaaccacgggcgcgcacgatagagagagctgacaagagcaggtgttttacgatgtagatacctgatcatgagccccttgttcaccatcacctggctagtgcccgtattcatgggagcgttcaaagccgctccggacgaggtctcacacgggcatagtcagcggggaggtggttattggtaacctggcgtggggtttcgttactcttcttgtatctcacctcgatccgtctttgcacctgtggcttgacccgacaagacgttcgagtggaggcaacttcggaagtaaatccagatgacgttgttatcggaagtaaactagtgtgacgttattctcggaagtaaattacttccgtcgatggcgcgatcgccggtatcataatccgaatattcaaaagctttgggctttttggaatcatcaacgtcgggggaggaggggcaaacccgacgttgcttcatcatcaaccatccacacgctctaacgacttgtactcgttcgttcttatacccatctgttcgacaattgactagcgagtcgaacggcatcaccctccgtttcgttgaacagatttcgacccctgaaaaatcccgcacgccaccatgttcaagcaagcccttcgaccgttggtccggggatacgcgaccgccgctgcccagctcaacaaagaggtccatggattcgtcggtgctgtagggtgagtcccgagtctcacttctagatccgacgtcaagtaagaaaaagacgctctgtccgctgacaccccaccattcactcgacttttatcgctgtaggaacactcccttggtgagcaaccctacgcctcgttttcggatgctgcaccgccgctgaccctcgcgagccccgctcgacccgatagatccgtctgaaccgattgagcgaggaaaccggctgcaacatcctcgccaaggccgagttcatgtcgcccggtggatcgatcaaggaccgagccgcgctcttcctcgtcaagaacgccgaagacaagggtctccttcaacccggtgggaccgttgtcgagggtaccgctgggaacacggggatcgggctcgcccacgtctgtcgcagtaaggggtacaagtgcgtgatctacatgcccgacacgcagagtcaggaaaagatcgacctcttgaggatgttgggtgccgacgttcgacccgtccctgcggtggcctttgataaccctcaaaactacaaccaccaggccaagcgatacgccgattcgttggacaatgccgtttggacgaaccagttcgataacattgccaaccgacaggctcatatcgagacgaccggacccgagatctgggcgcagacggggggcaagattgacgcgttcacctgtgcgacggggacggggggcacgttggcgggtacggtgaggttcctgaaggagaagagcgaggggcgggtacaagggttcttggccgatcctcctgggagcgtgctctacaagttggtcgagaacggcaaggccgagcgggaaggaaccggttcgatcactgaaggtgagcgtcgatgagccgtcgtcacccctatgtcttccctgtgcctgctttgttgaccatgacctccccgcaggtatcggccagggtcgactcaccgccaacttggcacccgacctctccttgctatccggagccgtccacgtgcccgacgccgagagcatcaagatggtctaccgtctcttggacgaagagggtctctacgtcggtgcctcgtctgcgctaaacgtggtcgctgcgaccatggtcgccaaaaagctgggcaagggcaagacgatcgtcacgatgctgtgtgacggtgcttaccggtgagtcgagtcggggcagaccgacgtccacagaccctgatgtctgacttggcatacatcgtgtgcgtgtgttcgcgcgtgtgagcagataccaaacccgactgttctctcgagtatggcttcaatcgaaaaagctggacacggccatccctgaaaacttgcagaaatacgtcgtcttgccttgatcgtcgcctgccgtcactgcttcttcccctccaacttggcatcctttttgctttttcacgccagaccaccttgtaatgacgcacatcgcgatgcatgaatgcatgattagcacgagttgtggattgatttaaatacaatatcaactccgaccaggaggttgtatcggtatccatcacgtgattgtctgtctctcttgcggtttcccataaatctacggtcaagcgcatcatcgccgcccgtcgagtcgagccgagttggtggtggcccatgagatgtgtctcttgttctctttgacgtctgctcatacgaccatggatgcgtatgaactaactagtcgagtctcacctaggcagacctagccagtacgtgctattcggtaagagtttcgacgtgaatcgggtacgtctgatcgttctcgagcaaagctcgcgggactttgccaagtacatagtagtaatgctgacgccatccaatccgctccagccgaactcaagaaaatcgacaacccgcatcaaaaacgctattccccccccccccccaacggggggcgggggggggggggggggggggggggagactcactgttctcctcggcccatcgaagtccttccaggtagtccacctctcgatccgcttccttatccagcttgttcccgacgagcactaccactagatgaggcgaagccaacgctcgacaatccgcgagccacttggccagatccaagaacgattgtcgcctgccggacgtaaatatccggccgatctgttcagtaggcgtcaaacgtgtttacgggatgggtccggacgtaccgtgtgatatcgtacatcaaaatcgcaccggcagctcctcggtagtaacttcgcgtcaccgagcgaaatcgttccgatcctgccgtgtcccagagctgtaaccattgtcaggatagaaggtgtaggcattgtcccgtcaacacccgttgatgaatcataactcatggtccgggacttgcctgcaatttgaccgttttgtctcctattcgtagtgtccgcgagttgaattcgacccctatcgtatgggcagaatgttccttgactgaaaacaagatccacgggtatccccgtcatcagcatcgaaacgtgcgaatagagatcccacttctgtcgcccggaggatttcggcaacctactcacacgattcgtggatgaactgatggacgcagcacgtcttgcctgatccagcttctccgatgacaatcatctttagcagataatctgattcgcagaccgaaagtcggcgatgtcaatcgtcaagcatgtcaatagtgccctcaaacgcacggaacttaccatagctttccacaagctcagtcccttcgaaatccatcctgaggactctttctgatatccgtcgagtgtacgagtctcaaacagattctctgcccgatccagcctttaggtcacttcgttgttgatgggccggcggggaggtcgaccgtgcgatgctgtcgattggaaagcctgaccgcaatctttgacaagaggatgctatacaaagactgacccgcggcgattggcgactggcgattggagtgcttgttcaatgcgtgcggaatcacaaacgtcttgatgagggtgatggacgattgatgaggtatcacctagcttgtcccttcgggatatctgccgaccccgaacacgggaatgggatttcggaggctaattcatcacaaacgtcgcgtgcggattccaggcctggttctcaaggccaatgtcgttcggaatgcgccgatgtttgtgtgtctcgagcatcgagggtatacatgtcctactgacacggggtacaaccaataatacatgctaatatcgttgtaatcctaccatgctaagatcatcggccccccataccccctccaagcggaccttctacacccccattaaaatgattctcggcgccctgccagacagacttgagcacgaacgcctcggacaagagcaactcgacgtcgtggtctttccatgtatccgttggcagtctctgcaaaaacattatgatttcctgcaggtctccaagcaggaataagccaacggtcgacggggctttgcgtgacgtcacgggaactgacctgaaagtccattttctgtagtttttggctccacttcaccaagaacgccgaacagacgtaaagatggaattgagagaatgcatccgctccctcggcctgtaaaccagtattggaggctgtcaatacacatgatcgagatacctgagccgtcctcggcttaccagataggtatcccacatccggatggtacacttcacactgatctcccgcatcaagagacaattcatccaccgaaaggcgaattgcatatattcgacgccctgttcatccatatgtgtggccagtggacctatagccgatgatggtgatatcttaagcacgctcgtacgtggagttgaacacagctttcgaaatgctcacaatctatgcgcttgacgagctccgccatgcgtttaacctgacggtgaatgccaggctgagcagatatgtagttatcctgaatcccgtcgagcagcttcgaaagacaccagaaagaatctgcttcgatagctgccaagatgttggcgggtaattgagtcgtgtcgaacagctccggatcacaatctgcttcaggcgcgatcagacccgtttcactttcctccgacagcaacgggtagactcaccgatataagcgctcaagaaaacctcgaagaaaggcgttacaagatcgttgatcccttgcacatagccagatgcaggatggcgaatggcccacacgtaaaggatcctctccaaggactataatgtggattcttgcgttaagctgcccgctgcccgggttggctgtctgtcgactaacccgttgagtgacttcacaagcccagagcgggacaccaggccttgtccgagggacgtcgatctcgatttgatgccagatctgacattcttaacacatcgttagttcggcgacgcggcgcacaaagtccgaaagacatttgacccacctgcgcatccatggtcgtcatcccgcgaccaaaagcctggttgactaggtgagcgtattctttacgtttccgctgcagtgttgctaatctcggttgagtaggcaacggaagatagttctgttgcggaatggtcctcagtacgaccccttgacacagattgcgatataggtgggctcaccagcaacatctgccaagcgatcggtcgcaactcttccggtattccggcccatgccagctttctcaattcagaaggatcgacgccaccgcctcgttccgagcctctccctctcagggtcttggcgaatctctctctcttcctctctgtccggatagaccctgaacgcgttctcccggcggtcttgacgaaagcgggtatgctcgctccgaaaggtccgttgctaaggtcggcaccgtgaggctcatcttctggtggcagattggcagaggcgtcgctctggctagacttggagggtgtcgaaggttgtgctgatagcctcagggtatgcaacggatctgtaggaccgggatgtctccttttcagctcgtacatatgtgagcagaagaagtcgcgcaagcggactcacccttgaggatatcctcgatatcgctcctcaaggcttccttcccgatcttttccctcggtttctgtttctcctccggtacaggattgaagatcgtcgctacggctggcttctccttttccttgcccttccaccggacgcttgagaatccaaaagccgaagaaaccaagctcgccgccgacagactcgggctcttgacttcagatttcttcttctcgggcacccaatcgttaccgaagccgtccataccgctcttgttcacgtctccggtaccatagctctgttcggcctcgacgatttctcccgtctccaggacctgccactcggccttgggcggcaagtatccgttcgacttgttgtcgtacgagctcggtgatgggggcgatatatgggtataagagaaggaacgggtcaagatggcgagaggagcgttgttgtgtccggtcgtagaaccgtttgcggacctgatctcgctatacagccgagtaccacccggatctgcaactccagtagtcggtttcgagctcaagctcgagggcatgtcgtcttcatgctgcgttaccctccgcaatgggttcgtccgaggaattggcacagccgcggacgattgattagcccttcccgatgacccagcgggaacgtcttcgtctgacccgctgtcccaagcgtcatcccagcgatgtcccgagccgtaacccgctcgatccctttgatctccgcgcgaccctttttgcctgggaagtgtagcgtggcggttcgcagagctcgggcttatgcttggtgatcctgctcgcgaggctggcaaggctaaggaagcggcatatgccaacgtcgatgagacgggggatgatacgcccctctcgtgcgtcgatggcatctctctccctgcggtgttggcccactttgtcaggatgttcttggtcgtcggggaggccggaaggtattatacggggagcggaaatcacgagatgtagatttatgaaagatcagggagcctcggaccgtcctgtgtgctgtccttgattcagatcgaccgatgttagcttgtagcttgtagaattgtagctcgaccttgcaatcatgatcgacgacttctaggctctctgctctctagaacgcgtccacgttggcgaagcgattgattcccaacgagaaatgacgaatctcgttgaaagccactactacgacaccatccagccattcgatgtcgactcgcttcaaacgtctgatgtctgtaatcaggccatcagatcctgtcacagaaatggtggacgaaagtttgcttgtcagtggcctaatgaaattcatctctgaatagccgaccatgtagtaacagacaacacgtcctggtcgtcgacctacccgatccgacaagcgcatctcctcgcccctttttgtgagcacgtacatcacacacaaaatggccgagggcttcgggaggtcaggaacatttgcacgattgcgaaatttgattgatgggtcggatgaatgccctgcaaggtttagctggcatgccactcgcggacacgtatcctgctgaacggcctgcttgggtcatacagcgcctgctctgtcaatcgctgtgtctcgagttttgccgtatcatttatcggataagtagctaagcgtctttttcttagggttcatggcgatgattctatatggtccaccagccatcagatagtcctgtcgagttttcacgaacaacagtaacgactgatgcacactcggcggacttgacacatttgccacattgggcatatcaaaagaccgaaagccgggcaagaacctggatatgaaatgtccaccgagacctttaggagtacgtcaagcttggagtctgcggaacgatgcgatgggcacgaggtcacatcacaaacccttccgcgtgtctgttccatggtgaaaaaaaaaaacagatagatcttgacaggaataggtcaatcgcgaattggcatcagacttgacacagacaccttacattgaagtagggaggcttaagagatatgtgctgctgctttcactagctaaactggagcggatgtctgggtcaaggcctctgccgaagaaaaaagacaagtagcttgccagcttccagatcgattgagtgacctcagagaaatataaaagcgcatcgttgaccagtgcgcaagaacgtaaagatggcacgggaaaggctggtcaacttgtattctggtcgaggatctgaatcatctgggatggattgattacctcgtgctgatccattgcgtctagcgttaatcttgcaggagccgggattatgaccggttgtggatcgtcgaaaggaattctaagtctagtgtcgacgagtcagctggctcgagtgtcctgcgagttgagaccttcaatcgatgctcgatcgtatatgcactcgaagcccgcctatgcgcttgacgacgcaaagctcaggccacgaaaagcgagtctatggagaaacccaaggatatggaagaagatgcgacgtcggaagctttctggattatttacttccgttaagccgaaccagagggccgtcttcaagaattggtgaaatctatagacgcgaatggtcatgaccctgatcatgattccgcacatctccaatcagtctgaccccccctgacataggcacctatttttctttggagaggatgggtacaccttctgccccgggaccggtgaggccaaagtttgctcctcgctttccggcgctcaagagcgagctcgccgagacggacgaacctggttggatctcggtcattgagaacgatgcgtatttctcgctagagaacgtaagtcgtcgcaaatcgatcctttagctactaatatccctatactaatatcaagattcttttgctcgttgtgccagttctttcggacgttagaagagctctgcttgcatccagagcggaattcaacttccatcttgcgggccgacatcctgagcgatactcaagctggtcccagcagcaacaagtcggttttcgagcccacagagacaccaactcaactcgatttccagactcctatcgactttatcgatcgtaggagaatccgccggaaactgttacctaggaaaccgaacctcgacaagcctctcgagcaggactgcatctttcttgctggaaacaacacgaagctgccgaaggggctcgtcatcttgctaccggacgctcaggatgagcaaagcattcctttctatcatccgaaactcaagaagcttgcgtttcattacgtggagtcgaaaagctacgaggcaaagaatgatccggatacggttcctcaaggaacgattaagatctccgctttgccttttcccacctctgaatccttgctggtcaataaagtgcaggaaggaatcgctgtagatgtcgcaccagaagatgacgtaaatagattcctggcgcaacggacaattaggacctgcatgcatctcctcgagactctatacaaacacgcctggggccaacagcggggttacgagaaacgggtcgtccacgacgtgagtagaactctgatcaaacatcccgtaaagacgaggccccgcgggctgatgatcatcaagcatattcgagcaggttttggtcgtgcgcgagaactttcaggacttgtacctggtactcaaggagcgacataaacatctggattcgaggaagaacaaggaaggcttcaacaaggtcatggacactaaacgacatgtttggaaggtagccatcacacaatgatcagcctgttgaacaacgcactgagatcctgatctcaaacaggacgtcgccatcgcttgcttcttgatgctgttatggaaagacatgtatccgtccactgagacggaatcggggatggaagatgtgcccccacgaagaccctgggattcatggggtagacctcctggtggattcttggacttgggatgcgtgagtccgaggtagggctgcgtgagctaagccgagccgctgatgccagaatcgacaggggaatgcgcttttagtgcacattctgatcaccgaggtaagcctggccattctggctctttcagagtaaagctgttcttatcgtgctcgatcgcctcggtggaaaggggtacaagggcaaggggattgagttacgagaacgaaggacgtggccagattacccgtccaagacaagggacaatctgatagagcaagggatcgatcctccgacgtggttcccccggacgctggaagaatggaaatccgggacatgggcaggcaaagaagattgtccgattgaggaaggcatgttcctcatcggtaaccacgccgatgagatgactgtaagcaaaatcctgtctgcttacctcgcatccaatgctcaccaagggggtctgttctgcgaatgtgcacagccctggctgccgttactgtccctgatcccaaaaacccctgcgccacatctgtcactaccctgttgtctacataccttgaacggtctgtttacatacaacaccttcgtgccgccccactcacactcgcacatgcctgcgggagacttcgaggatggcttggaaaagggcgattctcgctacaaggcgtatctcaaatggctcggatgggtagggctgaactgtggctggcaatgggagaaggaaccgttgcgcgtcccctcgaccaagagttggggcatcataggttagtccatgtcggatccaaatcgatcaagcgactgacccacaaccataccgttccagctcgcaagcgatggacgaccgacgcagcggaggatgaagcttgtcgagactatgttctcagtctggtaaatcatgtccgacatagcgacggattctcagttcgggaaagagagggtaacttggacgcgcattgagctgggtgatagcggcagaaaggctggccgaaatcgtcattgtcgtataatcgaaccgagagtgctgtgaatagcataatacaactcaaaccacctgctataagcctacatctaagctgcaggggatgcagcagccgctttttgtgccaaagttatcttgtcacctgcacagtgcggaagatcgaatgagtacatggctcaatcggcgtaatactagccaggcacttaccgagagacaatgcgataccctgagtcttcgatcggatcctgacgtgaccttggattgcaccgtcttccgtcttttcgatagacaaattcgccaaagcgtcctcgccgaagagactcttggcgcacagattcgccgacaagaagtcacaatcgccgtccagtgcgccttcaggggtcaggcaagccatgttggtcgacttcatgatgtgctgcaggtaggcacgcaggtcgcttcgtatgccgaggaataaaatcagtcagacttttagatagacgtctgggaatggtagaggacatacctaatggtagtgttgacgttgaccttgttctcccactcgaattctgtccacatgctgcggaactggaaacaagagccattggatcagctctacaggaccggattagcctttcgtgaaacatacctgagcctcgttgcagtatgcaggcttgatgtaatccatgatatcaacgtggatatcgttaaggacgatgttgacactgctgtcagaagctccctgcttctcgtacacgacgttaccaaagataacgccagtctccgtcgaagacacctgtgaagtaatggagttcagcgatcgaaatgtggacagagctcaagagcatcgcccaccttgatagtggccttgatggtgtggaaaccatgaggagccaaagtatgcggcaccggtcgctcgaccagcttcaggtctcccaaagtcgcaaagtcgattgttaggtctcgcagagtctctgcagtctggttgacgatgaggacgtctgtaaaagagcatgatataagaggatgcgcagtcagagctataccttaagcgtatgcttacccaagacgatgtcgaattgctgcacagtcacgcatgcttccgcgtacacggaatcggagaatcctgacgacgattgcaagaagatcagcctcaagacacgagttgaagcggacgttgctacttaccagtgagctgcatcatgcggctgagcttggaaatgaagtcgtcgcggacctcggcgctgccggtggcacgggacagatcggcatcgatcttcaatcggcaaatcagcattgatttggcgggactctcattcctcaagaagtgctcacgtcattgtcatccgtctgcgttttcttcgcgaattgcctaaaggggatcaagtcatcggcctgaacaaccgccttcttggtgtccttctccttcttttgacgagctttcttctgtgtaacacataaacccaaaaagaaactcagcatagcggaccagtcatgaaaaaagatggagaaattgtacaaacctcttcattggcgaccatcttggtataagccgctcgagtgtctttgaggaagatgtcagaagcggcttgggcagtcttcaggttggcgagggtctcgatgcagttcatgattctctctctggaatcctcgtcgataggaatggcagcaaagtgcgactgtcccacgcgcacgatggacgtcatgatcaacatggcctgtcgatgttcaaagtcagctgtacggtccgttatcgcactgaatgagcatgacctacctccgctttcagcgcgttgacagcttgagcatcactggcgagtttggcatatctcaaggtcaactttgtcaaggttgaagcaaggacggaacttgtgtagaagtcgcctccgagaatcaaagctcgaagaggaggcttggtcgccgccttgacctgctctagtcgcgcctgcgcagcagcgctggtgtagacggtctcggtggcatatgttccgtccgctaacaccctagtcttggtgacggtagtttgctcctcctgcttctcgggcgtgacatcgtccgcggcctcagcggcgtccagaagacgctgtgaaagatagtcgtcagcaggcggttgtattcggttctgtgatcaagggcttacttgttcagatgccaagatggggatctctccgataacatgtcggacttcggcgaacgctcgcttgatatctaatgccagaacctggttgtcagatcttggtcttagatatcactcgaaccagccgaggctcacgctcgacatcctcgcagtattctcccacaatccataaagcgcctcggtatacctttccagacttgatatcgctgaaggtcgagatgagcttctcggcaatttcagctcgaagcttgggaaacttctcgaccacctctctgaaattgatgtggctcgttagttgcccgatcggaaacgacccttgtcaagcgagggtgcccttgggcttaccgaacaaaggccacaacatccaccgcagaagggttgtttgagtctcccaagaagtccatgagcacgtgaacgacattggcggcgacctcggagaaacggatagcgcaggtgtgaatgctctgaatcaggagctgtcgatattcgacgctcttgtcaaagtcttgctccgaggtggtctgcaattgcttcttcaagaagagcacgacctcttcgacgtttcggctggtgatcatctccaaggcgataccgaggccttttcgcttgacctccatgtctgggctcgacaaaaccttgaggatgtccataacaagaccgtccaatacgtgagggaatttctcgcggagggcatcaactcggtccagaacgatgagtttgacattgttgtcggcctccttgacaagcaactccgcgaaagcaccagcagcggctgaatcgatcgctcaaaatgatcagtccacatgctattggaagtattcgcaagaggagcaggacttacccttcaccgcggctgggttctgagtcaggctagtcaagctggtagcagcttcgtatttgacagcactgctggaagagttcaacatgctaaagacagatcggatccatcttgcctacaagtcgaacagaggccgagtcaacgaaacgcacccggccatttacgaaggctcgtgtgctcaccctgttgggactgtcgcccttagcgtcggccctgatcagctcaatcacggccatctgcataagctcgtccatcgagtcgatcgactcggacgagttcaacaggtacccgacagcgctgtcgtgcgacacgttgcagagcgcgacgaaagcgttacgcttgcatgtgatgtcggattcctatgcgatgaagtgcttgagcttcaggtctagacatggacaacgatcatcttgctggacgtacagcagcgaggaaggtctccaagagctcgggtgcgtccggaatcaagtgctcatgatcctggtagatggtccaggtcgcgaaaacggcattcttccggacgaaggagtgtcggtgttcctgcgtgtcgtcgcgcatagttggtaagcatcgatgcagcggaggatcaatttacggtcactcaccagacagcttcgaacggtagggatcaacggttccaagagttcagcctcccggatcttctgcaggtaacgaagagtagctccgcggatgtattcgttggggtgttgctgtcgtagcggaaagtacgggttcagctcgagtgtgggaagggaagcttggccggcggatactcaccaagtcattccggatagcgttactatgaaagtgtgttggcgatgagatcgcattacgtggagtagtagacaataacgcttaccagaccaagatcatctcctgcttaagcttgccttgctcatccaacttgggacagatcctgtaaggaaaggagctatgagcaacttgccaatcctgttggcgattgaaaattgacttactcccagtagaaaggcagtagcttcttgatctgcttgttcctggaagggaggacgtattggatgataggcatcaagagggcagtctgtttgttgcacgatgtggcacgacccgtcgtaagtatccgtaacaattggcctttcgtttcgaggacagagatttgacatacgtagttttgaccgttcagagtccccacgatgacctttctcagcgtatccagcttgacctcgtcgcttcccttttgcaacgcattgcgcaggtccgggatggaaggagccgctccagagtcgaacagggtgtcatcgttcacgatggtataacaagtcgaattgggatccatggtggcaggctttcggtctctgccagtctataacgatctgacaagcgatctgacaaatgagggagagcggggcagattgacgagctcaaaacgttttgtctatacgtctatatgccatcctcgtcattccaagtgtgctggataggctcaaggtcacttgctgtagggaatcgcgtctggatgcaagacaaccgtcattacccgtccgcggtgcaagagacgggaagcgtacaccgtttcagacgctatctatctgcggagtggcttgtataatcatcctgtttctcttcttggtcctgcagtagggaaggattcgaccagaagaagattatgcttctgccacggtattgtaacacaacgtcgtctgattgcaacgtcgtgcgtttatggggagcgtctttgagacgcgatgacaacgttgctgggtgccgcgccataccgacgtgaccttgtcttggaaaacgcgacgtggaagtcattggccgcgatgaggctgttctcttcaactgctcaaaacataccaacatcgtagttgatacgacactgctcaacgacggcataccagttacatgctacggtcttagtggactgtaggctttacccggctgcgaagagtctcgccgatcactgcgatgagtgacgacgaaggattactgcatgcacactccccacaagttgagtctgaagacgcttcagtactaggtgtaaactctttcgaacatatgccaccagcagacatcctggcgcagcactccaaccgacactaccgtcagatcttgccactcactctatcattatcactccgctgcgggttgctggaagagcgaacacatctaataggtataatactatcatagcaaaggtacgtcattcgaggtggtgcatcaagagtccggatgtatggcgtaaagtagcggagtgagaatccatattggagggtatcctttgagggtatttcataaaaagtttggttcttgcagattgagcgctgcgacgccgtataaatcaagtacggtgcaatccaagacaggaatgaatggcttgtgattggacccctttatgcagtggacgcaacttcctcaccagagactgaacgatagtatgcatacggcatcatcagagccggcgggttatgaatcattcgcagagctgatagtatcgctgtacgaagaaacagggaaagtgagtcggaaaacttacgaatcgaagaagccgtcccctacagatgttgatccacttgtctgcgtagccattcgcaggcagaaaaatcttccgattagaccctctcgtgcgaaaggcaagcttcctgcggatcacggatgatgcgacggaaatatacgatttggatgctggactactaaagaaatgcattgaccaggcggcttccgtcaaggcagagggggagcgtatctacctagacggatgtttcaggccgcgtggatcgacctcgacaacgcgatggattcgattctcgattgtattgctctctgttgagacccagcctttgaccttgatcttggacacacgacagcgtgaccatcttgatagggcggacagcacgatggacgaaagtgcgccatcagctccgatgggcaatactagcgagaccggaatgattccgactgtctcattgactcgagacgacggatcgaccgtggagatgtacccgtaatgcatttagtatccatccgcaacaaagcactttgaggagcatctcatcagtcacatgcgacggtccgataggattaaccacagatcacggggcttgcagatttgctttgcgagtgtatcttgtatgcctcaccaacaagatttatcataatacatcgccttgcacgattttcgaatccgcggccaaaccccaacctcgtagctcgtcgaacatttgccctttggtcccgtcgaaatgggatgggaaattgtgatgcagcgaaggttcgggtttcgtgtttgtcaccgagcgtccgatcgggaccgtgttaccccgaagatgggaaatcaggatggagatatcgttcgatcgtacgggtaggaagttctcatgctattggtggccctgagcaaacggatctgcaccttgcgactgtgagatcctcgggcgagccgtaggatggcgagtttgctccggccgccagtctagctcaagccacagctgtcatgtcctcccaaccgatatgtacgtccagtatgaacagtcgtcttgggtgatcttgggtgcggagaaatggtcacaaaggcaccagtcacaatctcagcaaggttcacgagctactagctcgagctttacaacatcgacccctttctttctcgccgatttcgggtgagaggtcgtagtagatgttcaacttgtcctcgtgacctcgtaatcaatctctcctccggattcaaattagcgcggcccgtggtctttcggtcgatcggacttggcggtcaaacagcataatcagttagcgcgcggtggctaatcgcgtccgatcaaaagtcggaacggcttcccgtccgcatctcgactttttattcgaatatctcttgtcccagttgcagattcaccatcgcagagtgcacagcgcctctccgaactcgcccgaagcaacgttccattggtgaccgtattctctcagcaccgcccccccccctcttttttcgaatgatcacgatgaccggacgagccatctctcaaccaagaagacgtatataagcagccctagctcaacaaggtctgttcaatatttcaactcgttcagctcgtcacgtctcagtttgctcatcatctcccgcacctcgtccttctcccttcttatcatcgatcatgttcggccgatccctcatcactcttctcgctgccagcgctgccccgctcgctacagccttccccttggagatccgagagaactcgggcaactcgagcttccttcccaccaacattggcttgaacatcacctactcgggtcctcataatgcgtaagtctgtgagcgaaaacattcgtccgcagcccaattgacgcaaccgccatgcagttcgcttcccaacgttgccatcttcgctacgggaggcaccatcgctggatcgtctgctagcgagcttgacactacctcgtacacggctggtgtcgtcggtatcgctgcgttgatcgaggccgttgtgagtcaagatgcacagatcataccatgagcagatgtttacccctatcttcgtatgtcgttagcctcaactcttggacgtcgccaacgtccagggatctcagatcatcaacatcgcttccgagtccctcaactcgaccatcgttttgaagatcgccaagttcgccaatgccgtcctttgtgccgagggatcgactaccgatggactcgtcatcactcacggtaccgacactcttgaagagaccgctttcctgagtacgtccgacagaccccatcgaaggaagctttgtgctggtttctgaccgctttcttgtctacagtggacagcgttgttaactgtggcaaacctatcgtcgttgttggtgccatgaggccctccaccgccatctctgctgacgggcctgccaacctcttggaggccgtcactcttgccggagagcccgaggctcgtgaccgaggcgctcttatcgccctgaacgaccgtattggagctgccctctacacccagaagaacaacgccaacactatgaacacctttaccgccgtcgagcaaggtaacatcggaggtttcttgtctaccaagcccttcttctactaccctgccagccagccgacattcaaggagactttcgacatcagctcggtgtctgaactgcctatggtcgatgtcctctacgggtaaatctagctctgtcagatattacaagagtgcttgagctgacggggatgtgtgacatacagccatcagaactttgattggaagctgatccaggatgctatcgacaacggtgccaagggaatcatcatcgccggtaccggagctggttctttgagcgatctcaccatcatcgaagtcgagaggttgctcaagatgggtttccccgtcgtcgcttctaccaagatgtgagttttcgtcgtatgatctgctgagcaaccggctcgctaaagcatcctgtctccgctgtagtaacgatggtgccgtacctgccggtcgagattggatctctgccggattcctcaaccccgtcaaggctagggttaggttgcaactcgccattgctaccggcctcgacatgaacggaatcagggccaagttcgagaacactctcgtcggctacctcgccaagtagacggatggtctgccccaaacaccaaaacccgtccgggaggtcggatccacattttagcaactcccctactctccagcatcttccatcttcatcaacaaacaggtttctcagcatcacagtactcgaacaataacacatcaatcatttaacgtcatccccaattacaacaaagcatttatatagatcccattgtcaatcgttcatacatattcatattcataatcttcgtgttctgcaagtgcgttggcaagacataaaacgcagacgtcgtttctcttgcgggtcgcgatgggcttcggtaatataggtgagcacggcctgcgagcaaacccaatagactcggaggcagcgacgacattcaagccgacggtaatatcgcatggaccatcttatattacaagttcagtgacgaatgctgctctagtgacatgctcgcatacggggaaagtggggtttcgtggaggtagcgtgatcagtcgagactgacaggttcgtaagggctactgagattcgggtgtgtgtgtgtgggggggggtaaactgatggacattgccagtacgaccgaattaagacatgcctaatctgtgcacggcgtcaggatgaggatgcagcggatgcgaataatgggttccatgctggccatgcctttgtttctgcttgcgagggcgggagtgaaatttctcccaatgtgtcgagacgttcaaagtgattggaagtccttcttcggcaaatggttggatccacgctggtggatgccagtcataaggggtagttgctcgctggcctacccaagtcggactcagccacaggttttcgaagtatttccaggcttccacccattcctgagagcgcaagatgacgaattcaaccaagaatcatcatcactgagcaagagataggaaactcaccacgagggtcttcatgccgtgaaccgtgatggtggtctcagtttttgatacccaccaccagaaccagctgacgctctttccataagtgtcctcgcgcaccaaaccggtgagaggttctggtgagggtggatgaaagttgaggaagttgtcgacgcctttccgttccggaatccttgccggatcggcatctcgccatttcggatgggcgggtaaagacaacatccacgagccggtcaagtgatcctcatatccgaccgtgtgcgggaacgtcaatttcgcttcgacaagcgatttgatctatgagcaactgcattgtgagcagagtaacatatttcgcgaagtatgatattggcttaccagcgggtagcttaaagcgtaccctaacccctggaaatacatatgtggccggtatgaacatccaagagtcgatccggtgaacgtcggttctcgataatcgagcgagagcaagtgattgagtagattcggcatgatcgtataggcgtcatcgtctgttttgctacaagtgcagcacattgacagattaatcatcgaacatggcaagtccctcgtctccattgaaaaactcactagtaccatagggccttgcggcctcgaccgtcctctgccctctcaatcagcgtctgccaagtcctgtatgactttccaaaatccccattctctggcatcctcttgctgtcatcttcctccatctcgtccatgacgactagatccccgtgttctgcctgctccacctctaactcggcccaggctgctcgatcgtgccaggcaggcgatgccaaaacaaagttgtagtcgatcaagtgttcgtacgccggaggaatcctcgacttttgatatttccgcaagagatcgcggaatgacctcgccttgggagactgcattgtcagcacgttgaatgagaggaaggctgtcgagaccaggtccgtcttctggtacgggtgaaaatgctggtcctttggtgggggttcaggatgatcacgaagtcttcttcgtttcctgcgttttgcaggttcgagattggggatctcaaattcgataggatgccgggcgttgacgagttcaggtataggaaaagtccacatgaacatcctgcccttcgagtctggtagccatggcatgagggcattcatcagactagcaggtaaccagtacgtatgagcgtgcaccagcaggtgggagaatgttggatgaggtttcgcgctccatccatgactacgcttgtgagtaagccagaaatgtacgggccggaatgcgagcaggaaaatccagaggatcgccaaggggatcaaggggttcctcttgaataggttgtacaagctcgaaaaagagcgagaggcacctatccggtgagccgcgagttggagtttttgagtatatgtcctggctcgacctcgtctatcacctcgcctcgaacgtaaatctggcgtgctgtatcgaggaagagcctctgaccgatctctcatgctggagatcgcccaggtcctgccgctatccgattccgttcttgacgtctgccgcctcctagaagtatagctgttcatgcgtcgaggcgaaaggacgttgttgacgcaacagaggtagatccaacgaggtcgtttgactacgtgatgcgagatacggatcaggagaaaatgcagtcagggcgtccccagaccacgacctgtcgtctcggggcccgctgattggcaaagggctacgtaaacgagctataacgaggtccagatattacgacaacgagctaagcgattgaccaggagccccgttaagtctgtatgtctcgcaagctgctagctgagaccacgtctgaactgtggatgatggacgaggaatgagagtaaatgcgtgacatgatcacaggagtctcttggaaatataaataaaatcgcccgagctcgctgggttctctagccgcgtggccaggacgggaaggtctcgctcgcgtcggggccgattgaacaggactcgaaagatccgcagcgatgcaaattcctgacaataatgtcccatcagaccgatggacagctgggactagggactagcgacagctaggaagaatcgcgagtatgtctgtttaccatcatgcagtcatgctctcgagaagatgctctatctgccactagcacgtcgtcgtatatcgacgtggaagccgttctcgacacgtctaccaccgctttcccctctcacggagccattttggtgaaacagaccccgcttcacccggattcacaatcctgcactgcctcgtctcacatcgccttggtcttggagaatcctggcagtcaatcgactatccaggcttattgctccatccgacccattctcggtcgaccaacccgccgagttgacgctctgggtcgatccgctcctgattgcaacgggcggttgacgtaagccaccgggaggagccgctccaatctcttttaccgttggtggctgctgctgcgatggagcgtcgagttgctgtgcggacgcctttggggtcttcattcggttccgaagacggtgtttcaaacccgaaggccggggggtagtcggtaacggagggacctcatctcccgcgcgacccaaaacttgggatgagctcggcgaagatcgcttaaacttgatgctgggcttcctcctgacagtcgattcccttcttttcaatacggcgagacgatacttgtcgacgactccgcgggcaaagagcgtgtcacgcccattggtggcgaccgcatcagggtcgtcttcgatcaggtcccactcgtcatcgtcctcgctcgccagcgttcgtgaaatccggtctatggacccccgattcatgatctctcgagagtgcctcgaggtcttgacgttgctcgccgcagcttcattggtgagcgcctggatccgctgcaacatagctgtggccgcttccacagtgggagtagatgtcacggttgtatccgggacgggatcctcgacgtcggtgctcgtattcgaggacgacgaggacgacgcgtctgcagcgccgacgatcgtatcttcgaccttccgctccgaatggcttgtctctgcatctactcccgacagatccgggtcgataaccgacacaatctcgtgatgcttgtagagataaccatcaaaggcattgtcacccgcctcgataatggcgtccttgtcggtctcgtcagcctcggagcctcctgatgtagatgaagtctcagctcggagagcagggtccatctccaggaaattggcatcgaagttctggaaatcgtactcgagactcttgtctgtcggcggaatgtacggaggctggatgaatgcagaccatgtcccgacttagacatgaccctgagtaattctgaaaccgctcaaccacccacgatgtaacgcttgtgcttgacgtggtcccaatcaaccatggctatacccgataagaagtatttagcaaaaacacggaataaacgcgaacgtcatatatcttacccaagtagggatgttttcggatacctgataggagaacagtgtcagaaccgattgtatagaacacgactttcgaaattcactgacgaggctcgcacaagcgaaacatgggatctttctgcagcaagccccggatgaaactcttcgtctccttgtcaagcgcgcgatcttcagggaatcgcaactcttcgttgacgacacgcatgtacatctcggcgtggttgtcgacccagaacggtgtctgatcaggcacgatatgaggataagcggactgctagacgtcccttggagctttaataactcacattaccgatcagagcttcatacaacatggttcctaaggcccacctatgatcatgcggcattagcttaggttagcctgctgagcgtcacggagactcaccagtcgacttcgtaggagtacggcagtccttttatcacttctggggcctgaattgaaaagtatgatctatgaatacaacgtcgcagagcaagaagcatctatcagcgtgatctctcgactcacaagatattcggcggtgccgacaaaagagcttgcatggtctctggccgtgttcgatggctcttcgggtccgcttgagcctggtgaagtactcgataaggtggaacttgtcatccacaagggtgctgccgctagcgggcccttactgtccgggaattctgcagcgaggccaaagtctgccaagctaaaaaatgaatcgcctcagtcggtttggctctaaccacgatgttctgatttattgcttacgaaacgtgtccatcggagccgagtagaatattttctgcaaagtggacgactctgcgtgagctatgtgcttatgtattattgattaaagtaagcggtcgatggcccacccggtttaagatcgcgatatataataccggcagcgtgaagcgcctccacgccctcaacgatctcgcatgtgtaaaacctggcgcgatcacggccaagacggccccaccgggagagctgggtagccagatcaccgcctggcaagaagtctaataccaagtatagattatccacgtcatggaaagaccaccatagtttcacgataaacggattccaaagctctgctgatgacatccggcgtagcaccgattgttcggtctgcaacgaaaaccgatctcaaggcttttagggccgcaacctgtcgaattgaaggcgtgacaactcactagcgtatgggcaagttcctgatgcgccaggacgtgccgtttcatgatcgccttcatcgcgtagagtccaccgctacgcttgtgcttcaccagcactacctacgaaataatctcgtcagatgaaggcgttatcggcagataaccttatgtttcttactttaccagcgcagcctttccctaatacgcggatgagctcgaaatcatctacacatgtggtcctgcgccctggctgcttccttttcttcggttgatcggacatctcctccatgacgggcgcgacttgagaggcctcaatcggcgacgtatgagcattcgtttcgctcggatgagtttcacccgcgtcgttacggctgccagaagggtgatctgcctccagctcggttggcttcgtcggctccgtcgctccagtcggaacggtactgatagacggtgatcgagcaataggaacctcggaactctctcgggttgccttcttctcaacctcgatctggaagtccgtaggcggcaaggataagctcatctcaggcaggattggtcttggcaaagcacccaagccaggcgagggtgtcttcatagctggcggttgatcatgcctgtctccgtgagcgaacagacttagaagaccctctcctaagctccggctcttcctgatcatcgatctcctctgagccgaattcagcttgtcaagatcaaggcgttgtctttccctctcgagtttcaggtctgcgctgtcatcccatacgactgcccttccagcggatttctcgttagctcctgaggtgccgaaacactctatccacggcaaggaagctcgaatggatgtttgttgggctagcagattcaggtatgtggaaagttcgctgatctgttcttcaccttgtcgttgcgcgaagccatcggaatgagtgagttcagattctgctagttggggagtttctctttgccgcggaggtacatcttgcgaagatagtagggggcttggtagcagtgttccagggcttgcgtctttgccatacaatccacccgacttcaaagcgctacttgagggtctagaggctgccttggcgaagcgctcatcggcagtcattgctgtgaggagagccgctgcgctatcgagagtgagacccttcgaatcgggatcgttgccctggtcagaggaaggtcgattggctgatactgagaagcgatccacaataggggagagcttttcctcaaaatcgaatttccctaattcgaggctcaaggctgtgacctgatcgagactgttgctcggggtcaatgctggcgacagcggtccaggtgtgagcaggtgcagagatcctggttgactgacgggcgaagtcgcaccgctcctgctaccttctgacactgcacggatggtcgacttcatcttgttctgaagattcgacaagaaagagccttgcctcttcttgcttcccaatgaggtggtgtttgatatgatggattctggtgatgctttcgagatctggctgagagaactctccgtcctcgctacgggaaccggtgaaacaccctgaatcgagcgaggaagttcgggtatgtacaaatctcgcagatgaccgttctacaatcgaaatatcagcctgcatagcgcagcactcttcacaacccaaacccttacagttctttgccattcgacgagcccctcgtgcaggctggctaactcttgatgagtcttgaccaaagtctgctgacctccaggaactgtatgttcctcattgttcagctaagtctgaactgagcgaaacacaagagatctgaccaactgaccttctagtagaaccaccacctctttcttctggggagttgaaggaagacctgatatttcagagacgaccgagctgacgtggattgttgcaagactcccagcaaaggctatgaagcgagtcgtcaggatcgccgaggcgtatggaatcggggtagaacacttaccgtccatttcctcgttctgtgattggtcacataagcccaaaggcatcgaacgggatacactaatcggatcggtgcccctacccaattccctttccgtgtgttgttgagccccagacagatcctctctggcttgctgatcgaggttgccgatcgatttgtagtttcgtaacctgatggaagagaacctcttatctgtgtccagcgattgtagcagtccttctgaccccgtttctttcccactcggtgtttctttttgcctcgccatcctaagtctgtctagatcgagcggagtcgaagtcgaagtcgttaagccttctgagggtggacgctcgaggctgactccagtcgaggcgtaggatgtcggtttgtggctgatagcgtgttgaaaggaaggtatccccaacgatctgagaaatttgtcgcggcgagttccgagattgctcgttttccgtgtcgattgtatccgagtggacgccgtcgtagcatttgatgtgctactcatgcttgtgataagcacttccgacttggtaaagtattctcgatagggctgaccaacagacgtctggctggccagtcgcctctgcagcggcggagaggttgagatatgggtagagtgggacagctgctctaatccgcggtccgccgaagaaaaaaagcgtagcaaaggctttggtgtcggctgatcggttgatgaagcagtctaattctataaaggctggagaccgaaatgtattggatgatggatagaggctgaattcggcggttgtattcacgatgggctcattcaggtattgggatgcttgggacgcaagtgcggatctcagattagttgtaggcagggatcccgaagccgttctgggtcgatttctctgccaaacctccttgatcaccgtcatcatcagatcatcaaatcgatcaagaccatgcgattacgattatttatcgattattgttattgtacccctgtgggcacgaacaacacctgctcaagctgatcatttcgttttaccccttgatgcgatcaagtcgtttcaccgctcacactcgcgagccacatttcgccttttgttcccgcgagcacggcgaaccggacacgaagcgtgcagcaacccgcggatggatggaatgggatgattctttcccgcagaagtagtatagggtcccgtcggtttgcaagtcatgatatgtgatatcgatcgatgttatgaccacggacatcgtgctagccacgtattaatcacaaacaggaacgcgtgcatgcagagagcgatcgggaaggacgtcgcgaacttccagggaagtgcttcgtccctccgtccacatcccaagctgcagcgatgagtcttcggggacgtctaatggaggctatgagggggaaaaccagatacaaaacagtcgtaacatcagacaaaccagccacgagaacagtttactgctcgttgttgtggtcggcaaaggtgatcttctcgccaggtcgaccctcggaaaggagcacaacagcgtactatagacgacccacggcattagtaacatgacgttgatcctccggtgatgatccgcaatcatcgagtttgactcacctttccggagatcttccagcccttttcttcctcatccaacttttcaccgacaccgtcggggataccgacaacgatatcgctcttgacggtacggagcgagacgatgggcggcgcaccgggagtgctggcgagaggtccgatggcctgggggaagggggtgttgtaagggtagtggcagtcgtatccgagctgtagatggaaaaaaagccgaaagccattagcgtttggcccgtacaagatccgtgagcgagagacgacgcacctttcggtggttcaagtctcccttgaagatgaccaaatcactggtggccagctcaataaagagatcgggagcctcggcggtcaagctccagaaggtgaatccggaacaccagaagggatggctctggtacttgaatttaccctccttctcgtacgacttccatcgtcgacccatggccctcaaccagtccatctcctcctcggtcgcctcggggaacaagtatccgtagacacaagagttcaagatccagtcccagtccttcttggtgacgtccgagacgaaccaggggatctgcaaggccggggcaaagagaacatccgtcaacacctcgtcaaaaaccgcaacgacagagcgcaagctcttgtggacccaccttctttccgtggaagacgatctccctgcagattccgctctggatcaaccaatcggcgtagacgagatcacagtagagctcgaatccggcgttgtcgaggacgaaatcgatcctgcctcccttcatcgaagcgaccttttcggtgatcttgtcgaggtcgttacccaaaatgttcttctccgtcgccgacaagtgctctcctccggtagattggagcttcttgatgtcctcctcggtcatgtcgatcaagagggacaagtcggtcgagtttccccaaagacagactgaagtcgaccggtcagccaggccggaaagtcgaatgcaggaacaccttgcgtgcactcactctgggtcaactccctgaacatcagcttggaggtcttgagcttgtcctcgtccgagattccctcggggaaagagaagggcgaggcgaatcgggaagcgagctcaaagacggcctcagacgatcgagcaaaggtgtcacacttctgcctgaaaaagacgtctgtagggaagagttgggtgcaaccggatttagtgtctcgggcattgagattatctaccaagtcgtcgagatggacttaccgtactcgacccagtacttggaaagggagaaacactcgcggagtcgtcggtacttgtaggcctcggcgaagacccaaggagagttcatgctatgagggatcgacccgatggtatcagcgatcaaaccttcgacccgtcactcggagttttgaccaagactcacaaatcctttcctcggaagtatcgagcaatctccttgttccagagggcgacatcacccgcaccgtcatcggcaatgtacctcaacttgtcgttcgacttcaacgagtcgaggaggtcctccatcctgtggatacactcgacaaggtccttgacccggtcttcgtcgtactgttcgcacgcacccatggggtcagtttacccgagcggcttggggggacggcgaagagccagacgggcgactcacctcttggttgacggtaaggtggacatcggcgatacctttctccaagatggtgggcaatcggaccgacatggtagcatgggcgaacgagtattcctacaagatccgaaacgtttcgagatgcccaagtttagtttcgtccggtaatggtcacggcatctcgacgggaaagtcgcgaaaactcacgtggtatcctcggtaagctgatcgatcgtaaagcaagtggatcgagatggaccgtcgcgcgtcatcagttcgtcaatcgtcaaggtcggagattccggacaaagtggaaagtcgcgaaagtggacacggggtaggaaatggtggatcgtttgtgagagtaagcaaaaccgtcggcaatgatgaggtgacgactaggacatcgagcttaccgggccattgaggttggtcagggttgacccgggaaggagttcgagggtactatcatcgcaaaaggccatacgagtcagtgtcagattcacgctgctgtcaagtcgagatcctgcccggcgattcagaccgggttcgtcgatcgatcgctcccatatctaccccagtccgaatcgcacggtcggaacgctcgatgacgaagagaaaagacccacctgttctcgcatcatggcgctgggtttctgacgagggggaagcgaacccaagttgagcatgaccttggggttggcgaccttgccgtcggcggggtttgcagctcgaacttcagacatgtcgagtcgttatcttttttgcgggttctatcgagaggttaatcgtgagcctgagattctagcccgactgcaatgcggtaggtgggaggacaagcaggagctggtcattctagttctgaacttaccacggagctgtgaggtattatatacggggtctcgaggagagaggaaaggcaggtcgagaatggctgaaagggtgggaaaaagaatgaaaggataatgactagttttccctttatctgaccctgtagagggtgctgttacctttttcaagccgtgtgcgtgtgtttgctttgcgtgcgtgcgtgcgtgtcgctcggtcgatgcgccgatggacgtgcgtcgatctcgagtaacgagattcgtctagagctagagcgagttgaacgtgcccgtcctgtgctcccgggccactgacgacgacgacgacgacgacgacgatcgggcagctacgacgaacacgtcccgtcgcattcgaccgagcaacgatgtgtctggcaagcccccgaccatccaccgaatgtacgaatcgttcgggattggttccgccattgggattcccaaacctttctcttccccttcccccgcctcgttgcccctctctcgtacccccaccgcttaaagacgcgacgccctctccgtcattccccctttgtccctttgaccgcttttgggttacgtcgtcctcgcttaaaagaaagattgacctcttcatcattcatctcccacctcttcgtgctcgccctgccttgcctcagccccttcctccgccttctcctaaacgttcccccatcacactccccgggaccgcttcgaaacagtctcctctcagccccgcacacgcacaggcaaaggcaacgaccagccttccggacgacgaggcagccatgattcggatgataatcaccaccacaaagcccttgacgtaggtgttccaaaaaaccggcttggcaatggatccgccggtcccgatcgagatcgtttgcgactaccatcacgcacgcctgtttgtctcccggtccgagtgtgtcacccatcgtctcgtcggttccttatcattttcgctcttccttgtcatcatcgagcgctcggcgaaccacgaggaaatcaatgcgcgacaacgtcgaaaccgctgcctcgcccgcgagcgtaccgtcgcactagccgaagcagacgtcggttcgacccgcgacgtcgctcgaccgactgcgtttcaaagccgaaacctcgctgaactcgacggaccgatctatcggcaaccgtcgaggcgagttcgtaattcgaacatgccacgtcttacgtctctgatcgaccggagtcacgacttatgtccacccactaaagctaacgaaacacgtcgacacatacctttctagcagcggatcggatgtaatacgagacgaggaattaatggccctttataatttgtacaagcgaaagatagggtatgtatatgcctagggcgtttcacggcctgtacgtacaacaagagcgttcgtgtatgctttcttcccctccccccaaaacggtgacggacccggtaatcaagatgcaaagaaaatggcgtgagagagcatgggggtagactttcggcaaagaggcgttgtttgtcgttgcccctccacctcagaggtatcttagaggtataatacctcgccgacgtccgaaaccttgaaacaaccgcgctcgccccaaacatctgagacttgctccttctcgatcgtgcgacggaactcccactgtgcgagaaaaattactctccgtcaatcctctgctccgatccgtccgtaggcacatgtgggacaagggactcacgaggttgcctcgactctcatcttcgggcgagaacgtgctatggtgaacagccaacgaagctttgctgcccatgacctttccgatctgaatggcatcccacgagttcaagtgctgcgttgaagtcaatttgtagtgattcaacgagatgccgaggatgctccggagaaaggagagagacgacccggtcgagatcgggaggcagcaaaagtccatcggtccgtaccggtcggcgatttctgtgatcgaggtcgtgagtcagtttcagaacgtctgacggggacgatccacgaggagatggctctcaccttggaaggccggacacatggccaggtgtgactctgctttgggggcgccggcatatcggaatccagtatcgctgacaagagaatcaagacacggtcaaccagatatcctcgtacctgctcaaattcgaactcgagattcacccggcgaagtacatcctgaacccgtcttgcggggtaaacctcctctctgaatcccgatcttccgtcgtatcctcctcgaacggatcctcgtcgttctctccccggttgaccacgcctacgacccagctcgaccagagactgctgaaatggtcgaatatccctcgacctgatcgatgttgtgccggggtgcagatgaccttgagcgtgagcgcggtcccgtcggcagcgtttccaaagtgtcggtcgtcgtaatgaccgccaccgcccgtcagaggggccgtctcttcatcagaatcgtttgccgcgctcgctcgaggtgggtagccgctatccgaataagacgagacgctccggggaattttgatcagggcttcttgatgccaatcgagctcgatgacttggtgtgcggggatcttgcacgagatgaaccacttcttgacgcctacagaagggacatgccgcggtgtcagctttgccacccgcgtcgcactgctagaatacgactcacccaaggggacaaagaagtgaatgtgttccgagttggtccgatacagctccatgatcgtgttgtaatcgagatggtcgtctgtcgagcaaagtcagctttgcgttctgacgatgcttgtgccagggatcgtactcacaatgatcatgcgagatcagacagatgtggattcgaggcagctctgccacacggcagggtggaggaaggttcctggacggtccaaaccactggacgggagaacacctatagccatcgattataccaaagtgtgtttagctcgggattcctcctacctccacggccccgatggtgcgcctcacctctgggaaaagatcggatcgaacaggatccccacgccttcattctccctgacccccttggccccgtcccggtcgggccacgggagttgcacaaacgtgctcgcgtgtcccaaccaacagaccttggcccggctcttgttcagaacttccccgttccttggtttctgctcccattccggatgtcggaccttgaccatcctcccgttcttgtccggggactcgttctcaccggcctcggggggcggtttgagggtggctccgtccatgtacgattcataggcgtcttgcagagacaatccacgccatgagggccagggattgcaaaacttgccggtaaattctcccttgccattccgtttgtgatgagcggtcgagacgtctcgttgcatggggaggacccggatggaagccatgttgccggaaaactcgtcgatcgagtctgtgtcgaagaagcctcgttcaccgtcgaccattgtgggcaaataccgacaggtcgccgtttatgtaggtatccgaggtatgaggctggctagtggcttagtcaatcggacaggcggacgttcccgaacgctcctcctttcaactgttgtcctgatgatcaggtagtcacgaggctagcgaggatgatctcgattaaagggatgtacctttccgtttgaagctgggagattagattacgatcctagcctgtttgttatcaaagtcgatctctgctaaagatagtagtgtgtttgtgaaccgagctgttcctgctgcgatatcctacttggatggaatgcaaagttcggtagagatggatgttgcccgatggcgcgagggggagagaccgggattgtcggaatctatggaaagccagaagccagcaggtggatgggtgggagccaagagatatcacgcgaggccgatgggaaacggtacaggctagctcagggctcgccgagaataacaataacggtactactgcgagatggacaaatatgactgcgcagagtaaccgttgcattactatgtgatcgagtttgcatttcgagagagagctcagaacaagtatatgtccttcagctcggtgacgcctctcgatgccgcatcacttttgctcgttggagcgctcgacagagatccgcaaatgaccgagaccacgaaggcgagacgggtacgtggttcgcaaagtcgaggcggacttcagggctcagggagtcggtgatctgtgaaccgtcgatagattttggtccgtaaccgggacaaccctctcgtcgtcctcatcgaccgacctcgctccatggcgagtcctgagcggaagcgatgtcacgcgggaatcacatcggcgaacgagccaacaacatattattttgggaaataccccgatccagctgcgtccgttggaagaggtcatgatgtatacacgcacaacaggaatcccaaagaaaacaatgctacaaccgtttcagacgttcttactcgttacaatgtcctagaaacatggacatttgccctctatacacgatccgccacttcgtctaccaacgacctcacgacggattcccagctgccgccgaagatgatgacgtatcgccagtcttgatgttactggcggtggtattattgttcccaggagctggagtctgaggcgcgttctctgtagtacgggcagaattgttgttggtcaaaggtttggtagcagctgtcatattgacattcggaccagccttctgggccgacccaagagtcgcagcgggattaggattgttgttgctcgccttgcctgcagtaccacccgaattggtgttggtgttcgtgctggcgttgacgttcccattcccgctcttgttcgcgctcgtaggcgtattggcccccgtggaatcattgcccgtcgcgctacctgcattggaccccggagtattcgctcgagcttgctgctggatcgttcgattgtctggccctttcgtggcctgcgccagggcgagattctgtacgaaaaggcgagggagagatcagtatctgctttggtgtcgcacagactcattccccagtcatactaggaagcggcgacttacatgtagatattcgacctgcagctgagtgatctgatccttggtccacgtctggccctcaggcggagcgactaatggaatgctggccaagcttggtaaaccggccttgttcaacaacttggcgatgaattccgaggacgggatttggttcttgcccacagctaccatctgtcgcgagggccccgtctggttgccaggtcccggaccaggcctgttctgcaccggtcggcccgttccactcaaattgcccggtccgccgctgttgttggcattgttgagcgcaccgggctgacccgttcgtgaagcaggtctcgatccgacttggggcataggcggcatgcggggcgagccttgaggctgcccttgcaccgggtgggtattggccggagagccagccatcgccccacctgcccgctgttggttgagatgattttgcaatcgctgcatgttcggcgacccttggggaggcactgtcaacctctgaccatttgccagcgtgatcatattgggaccggtgatctgcgctctcggttgctgcgggccttgtccgcctgctcctaccgggtttgctaccgggccaggaccaggcattggagcctgcccagcaggactcgcttgacctccgttattgttgttttgaccctgctgctgcaattgctgctgtgcggccacttgaagagcttgggtgaccatttgcgtctgctgcattgcaatttgctgcgcggcccccggtgttggcggttgacgtccagttgcaccgaccggggcaggggcagtcagccgaggcgcaggcgatgccccattcggtaccggtgtctgcgaggaccgactcgggggctgctgctgctgctgcataccctgatgctgttgctgctggttttggacttgctgttgctgctgagcttgagcttgggcttgtgcctgctgctgagcttgttgttgctgttggtgcatctgtgcctgatgcatacgttgttgctgcactagttgttgctgtctttgctcggccaagcgagaagtcatgcgagacttttcgtgttctgcaaggacacgctcgtattgcagctggctcaattcttggggtgtcggaacaggtacacctcgttgaggtaggaaaccgctatgactttcatgaacattgacgacctgctgtccgtcaatggtttctcgcactgagaacccgtcatgagtcaaacgtcagcgtgatgaagcgctcgacatgtcggccagagacgctgtgctcacggttgtttttccggttaatttcccgcctcttctgagaccggcgaatggcatcgcgcatagtgttgtttctgacttttcgcttcgaaccctggtaccgagcttccctctgtaacttggcttcccttctggctgctcctggtgaagtcacgctattcagatcgacgctctcgtctccagctgtcactgatgtcgccactgctgatgccgggatcgcggacgcaggcacgggtgttgtgtttggagcagttcctggagctggcgcaggtacagctgccgaagtcgtcggtgttgcagcggttgatggtacaggaggcaccgaaggctgagctgtaacgctcgtctgagaatggttggcaatcgcgatcgcctgggcttgagctcgggcttgctggaactcttgctgggcaggcgtgagagtcggctcgccctgagcggtggcgttcgcggcagccgtcgctttcgaagtcggtccccatttctgatcccatcgatggtaacaatcccacgcgctccgcttatctgtcgaaatggtgccccgagcagaattgaaaaggtctgcgatcaatcgccagttccaagcatagtcacggatcaggcgcaaaagcatgtcgtcatcctgctcgtcccaaagcacagtggcgctacggatggccgcgttacgaggttgctcgggtgcgcggttctgagagacgtcaacaatgggtctgggctttttcccctcgaaaatggctgcaggcattatgtcaatgatagtcagtgtgctgaccgagcgaactccccctgggcacaagcactcacgagctggatacgctgcaggatcgaagcgaaactcttccaggtcatcttcaggctcgtgcaggaacccctggtcgatgtgctgccactttccatccggccgtctggtcagcgatggctgaatcgagctgacgatgacgggtctgatgtccatgagcctggtcgtatgggtcaaccgaccagcactctcatcggatcgcttttccaccttgttttcgttcatgactgggccagtgtaaacgctcaagtctgggaacaggtcggccagaattacgtcttctgggacgacgacgttgcgagcggctgcctgttggctgacgatcgacttgatgtccaccacgaccgcagagggatcgctatcgaggaggggctttcgaacggcgggagcagcggcaacgaacgcctcacgcgggtcgataggagctagtggttcctgctctgccattagagtgtcgttttgaccggtagctgcgggcccgagggcgttgtttctcaaagccgcatgagcctggtcatcagtagcatgagctttgccatcggctgagggaaaagatcgcaaggttgcatcagctctggacctatgcccctacctgtcccttctactcacccatgaccacatcctcgttgccagtgtaggtcacctcgtcgtcgacttcgcccgcagcgtcttcatcttcctcgtccctttccccttctgcatcctcgtcgggctcaccgtccccgtcctcttccccttcggcgtcctcgtcgacctcttctttgggtttcgcgatcggttgttccgccttgccggcctcgtgtatgtgttccttggcgacctcgacgtcacgatcccgatccatcatgctttcgaggacctcgtccgctccttccgcctcgttggcttcttcgacccgttgctggccagctttgtcttccttgtcgatatccatccgatcgtggcccttgcgcccgagtggatcatgtctttggccccagcctcttccaccgaccatcattcgggctcgatcgacgtcgctcgccttgtgccacctccgaatttcgagggcgatctcttgggcgaggacgatcttccacctcctctcctccttgaaatccgcctgcatccatctcatctcgtccaacaaccaatcccaatgactctttcctcccgtcatgggcggccctctaaactttttcatttgcctgaaactccaggcgccttcgtccttgagctgttccacacgttcgagggcgcgagtgaattgaatttcccgccagaccgtcttccaatcccgggacatcatgcacttgttattcctcttgatcatcctcgcgaccgggttgaccgagaagccgacgccgagctcgacgaggtcgacatcttcgcgatccctctgccctgcacgttgatgactgagctcctcgttctgagcttgaatctggtcgaacgacatggcgcccatcttccggttggtcgcataggcagggggaagggcgtaggccgacgtcccggggatcatgacgcttgaagccaccttggccgtctgagcgttactcgccgccgccgccgtcgtcgtcgtcgcccccgccgcagccgcgctggtcatcggtcccggctccgcagcaggaccgcctcccacgctggaacgccgtcgatcccgtcgatggtgatgatgatgatgtcgatgtcctcgtttccccagactgttgaccaccccgctcggcaggggatgcaacgtccccgcgtatggactttcgagcgggacgaggtcgtccagcctctgcctcctctgcgcgtcggcttcctctgtcgaagggatcctcggtagactctcggataggggaataccaaagggagagatggtcgggttgaccgagtcgtccatctcggggacggtaaaccctgtcccggcgggcgggaagagcaaggggtgatgaggcggttcgaacagggccaagttccgtgttccaccgatccaaggtctcgttcgttcctcgtcaagtttgacggtggagggctcggcgtcgatctcaccgtccgtgcccggatttcggtccctcgatagtttttgcacgatcctgggggtgtaaacgtcttgcttctcgtagacgataggaacgctgaaatcgggaacctcgacgatttgccgatcatccacgcgcatcgccttgtcgttgtcgtcgttccctaacagctcttgcaccaacctcgagtcggcgtcctcggcatgatccttcttggtcggtcctagcgaggaaggtcgcggtagcgtcgtcggtctaggcaagggcggtccatcggctggcgtctcggccggctcggtctcgtcgacctccatggactgcgaagcgggttcagtcggcggagcgacttcagctgcgagagcgactcgtccctcggatgcggaaggttcaggatcgagcggagggtagatggatttgaagtcaaagtgcgataggtcaggaagacgtatatgcgccggttccgagctatctcccacccagaatcagcgagatgtcgaaaacagtgacaagagaatatcctagcggaggaggaaaactgacccttctttcaaaacgtattcctcgagaaacatcttcaacccgtcctgatcctgcgattcgaggtgccgcttcatctcgacggcgcgttccctttcgtcccccggtaacaagtcttccatcgtcgcgaacccttgaccacgggtcaacgtccggaccatcaagtagaggttgacgaggtctccttcacgccgatcggtcgtctcccgttgagcgtcgacgagttcgcgtacgagttggtccacggccgaggtgatttccctgggtgagaacgggtctgtcgacatgccctccaattcgacaaagggttcctccgaggtgggtgtaacctgcattgtcggtcgtctagaggaagatgaagccgaagcggtcgatgagggtgctggagggatcggtcgatctcgattccccctgtaggtgattacgggtttaggcgaacggttcctagtcggggtggtcgacgaggtacgagctgccgctgccgctctcgtcgacgaggaagcttgtgacgacgccggcatccttgcgagacgatcagcaagaggcgtaggtcggtctctgatccaggtcgatcgtgaaggggggtcaaggagtggaaggagcaggcgatcgggtaccggttgtttaaaccgaggttgtgaggtttcgaacccatcgattcagctcggtgagaggttgagagggggggtcgagggggtaggttcggtcaacggacattgtgttatttttttggattttaggatgatcatcccggtattacgtgatggcgattctgaatcgatgtccgtgattgctcaatgtccgcttgcgaccagtagcgagtagctagtagtgcaacctcgaaaaccactcgatgtccgttctttcacttttccccgaatctccccccctttccacttcccgagcaagagcgggaacgggtcgtttcccaaatttcagaggagggggatcactcgaaatcattatcgttggcgacatcatcaacacaccttcgtcgataacgatacaagggtcatccctctcactcgcataacaataatgaactgggcctgaacaggggtgtatagtcttagctcgtgttgaatcaccgaaccgcaataaaagagccggtcacacgagagacgaaataatttaaacgacgacaggaaacaggcagaccgttcaacccgggctctcctaggcgttcatcacctaccaactcgtcacgctgtcaaatcaccttttgaggatcaccagaacatctcgtatccccagctgctagctactttatcatccactcgtcactcgatcatctaccaaaacgaaaccgacatgacgaccatgaccgacctcgacccgttccaggagcaacaccaaccccctctcatggcgccctcgaccacctcggccgtcctcgccgatacctctccgggcccattcgaaggacccgagaaactcctcgagatctggttcgccccttctcctaacgaactgccccaggtcaatcggaccttggggagcggattagagtaccgcgccgagaggaagcaaggcggggtggcgtccacctctaccgacaacaaggtcagagacggacgcgaatggaaaggcttgagaagggtcaagcgggaggtatgggaggatatgctcaaggtggtcaagtgccaagtgttgagcgtgatcgagggtgaagagttggacgcttaccttttgaggtgagtctgatcgggtctgccgtggccgttcccccgcgactcgcctaggtttgcttacgactcgacccgacccgacctgaaccgacctattctggcctacagcgaatcttccctcttcatcgctccccatctggtcatcctcaagacctgcgggacgacgatcaacctcctcggtctcacccggatcatcgagatcgctagggaatactgcggctttgagcgcgtccatcggtgcttttattccaggaaatccttcttcttccccgaacgccaggtcgggccgcatgtcgggtggaaggaagaggtcgatttcctcgatggagtgtttagtgagtaaaagcttgaaggggaacggcgagcggtcgtcggacggggcaatgagctaacgtgaacatcgaatcgaatcgatgacggatgaacagaccatcaaggcaatgcatacacggtcggacctatgaatggggatcattggttgttgtacctgatcaacccgccgtcgggacccagcaacgaggacgtcaaggaggtcaatgtcaagcgaggtatcgcacatggatcatcgagcggtactgtggcggcgaccggacacggcacacggcaggatcgcgcacacgacttggagatcaacatccagcgaccttcgcacgaacatcaagatcagacgctcgagatgctcatgacccacctgtccccggatgccagggcaccgttcttccacccacccgagctggacatgaaccatgaccccgccgtcgcctcgtcctcgacggcccgttcgggacattatctcggctccttgatcacccagcatctcgggatcgacaagctgtttgacaaggacgagagcatcatcgattcgttcgggttcgagccttgtggctacagcgccaacgggatcatcggcagcgggagtggctaccccagcgcagagggggacgatcgagagggtgggggttactggaccattcacgtcactccagaggaaggatggagctttgccagtttcgaatgcaacgtccctcttcccctcaagaacgaaggctttgccgccaacggcaagcgatcccacaggcccgacctcaagaccctcatccgtcgtgtcgtcgacatctttgaaccgggcaggttgagcattaccctgttcctctcggccgaatccgaaaacgccctcttgaacgccaaccatcacggtaccggcggcgggaacaacggcacctactcgaacccgagcgaatcgtcttccctcgccgattcgggcatcctggccgattcgggcgtgctcgagccggctcacgagaccgaagcgacccgacgagcctggacggcgttttccaagagcttgttgggggacgcgtatgtgagaaaggacaggatcgggtacgagtttgaggattacgacctcgtctttggatgtttcgaaaagagagggttcaagcgcgcgctcaggccgcacgcctcatagcgtcgcctattcgcaatcatacaactgcacataccctcgtatgggtctgcttgtcgtcacttcctgacggacgttctttatatgtcacggatgcacggtctttccttcttttcccttttcctacttagagccttgtacacgggtttgccctaccttgtagcttattatctcgatcttcatgagcagcaaaactctggccgtattgccgcgcaacgatgcctgtcttgacaatggcaggtcctcgacataaaaggccctcttacggtcagatcgaatgggaccctcggtcatatccttctgcaccgatctcatagattgcaggaccctgcatcgttgcaccggcgttctcgatccttgcgaaaagatgaggtaaaatgcacggagccagtatcctcatggcgaacgataactttccactcaggcagcaccgtggcaccgtgatgacacttgctctgcaaactcgaaatcttccaggttttgagaggcaattttctgattgaacgaaatgcgagatgcgagatgttgctcgcacgaccatttcacgacaactcttcctaacttctcgcgcaatcttatctcgctttcggccggaacggggatcgggccgaaacgacgttcggatcggttgatcgaccggctgtgaggtgaagtagtagtagtagactagtgggcagcattcatcacatcacggtgaaatcattgaacgaggacttgccacaatcttcagatcaagcagatggtgacctagcgatggtgctgtctgctcccaccctcaaatcgccgaccacatcacggtcaaccgtaccaaccgtacaagcgtcttccgcaacatcctcgacacagaacctccaacaaccgtaccgccgcggttcaaagggagggttccagacgccagccgtcgatcaggacctcgccttgcccgacagggtcttggaagcgattttggaacacctagccaaggaggtcgtcctcgaaactgctccgatcgtcaagcatgataatctgcatcgaccggccgtcagccgagagtcatcccagacaaacgcaaagaccggatcaaaccaagagcttctgctcagacttttgtctctcagcaagactaccaaggtatgcacatcgcccattggagccaattcctagttcagttcaagctgacacgactcctcttgatagtgcatggccgaacgggctttgtacctctcgcccaccctgcaaaacgtcgactcgctccggcaatttacagaatccgtccagctcggggaatcacgatgggactcgctaaagaatacgccctattccacgccaggacgttacgtgaccgtgctcgacctccgtagggtcttggcgggacatcccaacatggacaggtcccaggccaggttgatcttttacgcctgcttgacgatgttgttcgcctcgctgcccaatctcaaggagctctacttgcctgaagggtgcgggacactacctcgaagcgtgttggaagcgttacaggagagtccatgcatcgcgaaagtgcgtgtgctgcacgggttggaagtcacgcatcggatcaatgcgcaggggatcgaccccctcgtccagctcttggctggtatgaaagaactccagtctctcaagatctgcggactcggagctcaggatgaaggattggacgcgaggatgttgtctagaccacagccgacgctcgcactgccaaagttgagaaagttgcacatctcggcggtcaggaacgggttgctcttggcggcactcaaggattctgaattgccagcactcgtcaagctgcagaccaacacctatcacttgctcgccaatgatctcacccatccgttcatggtcgctcatgggaagaaactatcgtccttgaccatccacgcagctatcgattggccacctattcggatcccagctcatccagatatcctggcgatctgccccaacttgagggaagtcttttacctcgatagcacatgtcctccgcccccagacacttttggaatgagcgactggagctcgtctctaggtccccaccctcttcgcgaactcaccatcgcgaggtggtcgaccaacgcgaacctgcgcgagataaccccagaaggactggtcgatcgactcttccagtccatatttcgtgcggtggttacggacgtcgtatcacccatacatgaatcccctcgtcgcaactcggcctcagcaacggccacgacgatgtcggcgttgtcattgtcaccgggcgcgtcggcggatttctcggggcggctgacgaataccatcttgcccgacctcgaggtgatccggttccatgatttcacctggctacgacccgatctcggtccagcagctttaggagcaggagtgaacggcctcttgcgcaggttctcgagcaggatggcgggtgctcggcggacgggccgaccaatcagggtggtcgatatgcatgggaacgaatgcccgcccatctttgtaccgggtagcaggggcggtatcggagcgagaggaggccaagatcctaggttcggtttgagagctcagcaggagaggcggagggcgagctttgacgacgagctcgatggctaagaggcgtactgagacgcaattgtattggttgttgacagggcaactttttgtattagtttggttaggcttgtatggggcaaggagcgttttgtatagcttagtagaaccactcaatttgtgcgaccggtaacagattctcagtggcatgagactgcttcgagggtattgccgctcgaccgaatgacgcataaacagaggtcctggtaacgccatcagatggacctaagccacaggtctgatcatacgcatcccgaatgaccacgccaatcccgaatactgtgagccgctcttctctgccctgtatagacgcgtacctcagccccgagaaaggggtatgctgtaccagctctgatagaacgcgagtcgattggcaattcttaccagaagctcttgattcttacgataagttgtcgtatctatgaaggaggaccggtagaacatcatgcaaagcatcgagtgctagtgctgagctggactacggctccagatatggcggggaaccatcagggcgcaactgccctcgccaaccattcctctctttggacagcactgataaaatcactggcccatcatcatcacttcacgcttcacctcacttcaagcttctcctcacttcaagcttctcctcacttcaagcttcacctcacttcgatcacttcacctcaaacaaatgacgaggccttgcctgatttcttaacaccggaacaacgtcgagttgaccgtcccgcgtcccaactcggtctccgtaatgcgttgcacagtggcaagtgcaccgagtatgccacgacatcacgggatcgaggtcgaggctctttgctccttgccccgtcaccgatttttctaggccttagctctggcggattacagcatatcgtgccttttagacatcccttacgggaaatcacgatatggtattctgagaggatgtgagtgacatctgagcctcgatataccggcgagtgattaccctgatgaccgttcgttcttccgcggctggaagggaatggatcttgactctatacgacctttacttctcagtaaaaccacagcgatctttgctattgtcttctctcacgttccatcacgggaacatgtctcctcaatcgctactcacggtcatatgcaaactcaagacatttcgtttcagttgaacctgaacctctccggggtcatgcgcgccaccctgacgcggcgcacgcggtcaggctgtcgtcggccccagccccgtaaaccccaagttctgcgaatcgatagtgccgcgtcgattgctcctaaacatcgcccacacaccgactagggtatacggcagccgcccttgccaaagagtgcatgtgaccagccctgttccttggcttagctcgccttatatctcggggaaaatgttggtcgttcgagagctaccgaggcttaaccgagcgtggtctcccggtgttactccggagaatcacctggacgtgctatggaattatcaatgtgccaacatgctcggagacgtatataatcactgcgacaggtccgtgagctggttcgtcgtctcgaagctcgacacatcaagacgtcctcctcttcttctccaaactttttccacatcgaaacgcctcttgctcttgcgaaatggttcaagctcaatccgtcgaatggcaacctcctgccgggctcttgcccaagaccttcctgcacggttatgccacgggtatgtgatcctctgattatctctgagcatcttgcagtgtccggcagatgctcatcgcacgtctgctctctattgcagcctcttaccaggtcgaaggagctcacgacaaggacggtcgagggccatcggtttgggacgacatgtgccgtgtccctggccagattgctgatggcagtaacggagacgatgcctgcaactcgtactacatgaccgacgtcgatgtacccctactcaagagcctcggcgtcaatgcctatcgattcagtatcagctggagcaggttgatccctcaaggtgagtcgagcggcggatcgatcgggggattcgcgagctcggtcggttggaaaatgtccgatcgccaggaactgaccggtgggtgtcgcgcgttttacaggcggcaaggatgatcccgtcaacccagccggtatcgcctattacaacaagctcatcgacgctctcttgtctcatggaatcaccccctttgtgaccctgttccactgggatctgccttccgggctcgagaagcggtaccgagggtggacctcgagggaggtcttggccgatttccaaaactatgtgcgactctgtttcaaagaatttggtgaccgggtcaagaactggatcaccctcaacgagcccatttgcgtcgtcatgttttcgagtttgggcttgaaacccgactggggccacgaaaccgacttttacccgtaagcccgagcgtcaatcattcttacacccgtcagccgtgctaatctgatcacgtcacgtcattataccaggatcgcccaccacctcatcctcgctcacgcccagaccgtagacatttatcgtcgcgagttcaagcccgagcagaagggtgtcatcgggatcgccttggtaagcagcccagccggttcccgcgaaaggcgagccgacgattgatctttgaaacgcgtcggtagaactgtgattggtgcgaaccgatcgacgattcgccggctgccaagcaagccgctcaacgtcgaatggaccagagcctcggatgggtgagtggcattgctggaattcaccccggaagacgaggctgaccagtatgcaccacgatcatgacggtatcatagtacgccgacccaatctgtcagttacgaccctgagccgatgccgctagatgaccagcgtggctgatgtctctcgatctttcctctctaccagacctcggacattacccaaagtcgatcgaggacaaggctcccaagttttctgatgacgagtggaagttgatcaaggggagctcggaattgtcagtctgaactctgcttgtcactctcccgtccatccggtggctaatgcctttaggcaaccacggcagctttggcttgaactcgtactcgaccttgtactgcaacggtgaatccgatcctgaagatcacctcggtggcaacactcgggcggtcaggaagaaggacggtgtgcatatcggaaacgaaggacacctcgagtggttgtgcgatggtgagtccgcacgacgagctagctcctcggtggctggggaacgttggaagctgatcgagaaccgctcgatgggcatagttccttggggtttcggcaagttgttggcttacatcaacgaaaagtacatgttgcccaatgatatccctctgatcgtcaccgagcaggtaagtcgtcacccctcatcgcttccccgtgcaaagcaccctagctgacacctgtctgttcgatcggacacctcagggattcgccgtcaagaatgaacatcttaaaccccttcccgagctcttgaaagataccgagcgtatcgattattaccggggttacctgaaagagctcaccgaagccgtgtcaaagggcatgcgatgcgatggctacatggcctggtccttcatcgacaattttgaatggaaggaaggttacatccccgctttcggagctgtacacgtcgatcgtaagaacggcgagtacacgaggactcccaaggagtctaccaggtggctcaaggcgttctgggaccgcgcggtcgatggcgagtcggagcagaacggcagcaagaagacggcggtcaagggcggtgcagctgcggtcccggccgagggcatcactgctaccgcttgatcacaagtctttgatccggcgtgtgcatcagtctcgaatttggggtttctagcgatgctaggtgttgtttggaggttgtatgtaaaataatctatcaggagtatgctccgaatgaaacgatcaactttacacagcgagaccgaccccggttgaagccagaagtggtggaagcaattgtaatttgattccgatcgttcctttcttttgcttccgttcctctcctgaaatggcgatgatgtcattttcgatcaccggtcgacctggccgggagaggatcatggggagacgaccttcgccattcgatgactttcctcccattcaaactaccaagttgctcatcacatccgctcttcaacgttatccacaagaacacgaggttctatacggaacttgcgctactgttcactttcccgagcatcgacgcctgaacacgatgccggccgcacgcacggtcacaccttcgccccccgcctcgatccataccgtcgaggtacaggaagaggtcaacgatcatccttccgatgccaacgagaggacttctctcttgaggacctcctctcggaattcaggagccaaagtctatgtgaattcgaaacatggcagggtcgccaagcccgccagcgccgctcgtcgaccggtgacggtagaacaggaggctgtcagggtacagcaaggacagagggtgagctcgtgttccgcatttacaggccgctagacaactgaatcggtcactctgttctattctctcagcgcatattgacgtcgatacccatgcagatcttgttcttctcggtcctcgccaccacctttgcctctctggcgatggtgctcgtcctctccctgaacgctgcatacgacttttccagcgcgctcctcccgtaccgaggatccggaatgctcgaagtatggatcgctgcactcggaacatggacgggattccagaccatcttcttcttcgcttcgcccgtctacctcatcttcctcgtcaacctcctttccctcctcctgcttaccgtcctcttcctcatgaccatgatttcgccccccttgcgaaaggcgcactacccgctcatgttcgtgccccttggagtgaccgccttgacttatgtcctcgcgctcttgtcctcttatgccgtccgcaaggctagagacaccgagggcaagcgactgatgcaggtcttggccgaacgacacgccgaagagggaatgaacggtcgaggccgcgtcaacgcctcggagaggagggctgctcaacgagagcacgaggaagaaatcgctcaggcattggtcgggatggagggtaacggcttttggaagggtctcgcccgcgggttcaaggcgttgatgggctttattggaagtcttgccggagtcactgtcgtcaccgtgagtagaggccgacaccctacagctgcgaaacgttcggttcctaatccgaaatgtacaactttctacccatagctgttgatcgccaacctttgtttgcgcgcatatgacaacaccgtgcccttgttgtcagaggacagcaagcttatcaaagtccaccccgccggctacccctggcctttctcggtacatcttctctgtaccgatgcgcctcctcacgcgaacgaatcagatcccacttttgccatggccgacttgaccgccgacctgcaagtcccatttacgttcccttcggaccacaaggcgccccgaaagaaccacacgcattacccgaccatcatctatgaagcgccttccggtgtacccggatcgctcgcgcacatccgaccggctcgtgtcaagaacccttacaatcctttccctcagcccaccccgcccaacaacggaaccgatatcaaccaggtgtctccttaccccggaagctggatcttgagcttgcaaaaggccagaaaggtctctagggtttgcgtttgggaccgacctgggtacggattctcggattccggacctgtcgaactaggaatggtcgcggattctttgcagcaggctttagaaaaggccggtgaaaagggcccttatatcttggttggagacggctatggagggtgagccgtcgaatagtctacgtagttaaaacgggcggatctgatcgagctcgtggttttgcagcatggtcacccgagtctttgcatctcgtcacaagaaacacgtccactcgattctccacatcgatgcgcagaccgctcagacctacttccgattccctcccggttggaacctcttgagcctgcgtcttcacaggctatgggatcatttgctgccctcgctggcttcgcccctcggtctccatcgattctactcgttgttcacccagtacgatccgtctatttctcgaatcctggcctcgaagcgacctcccccttcgaccgccaagctgtccgaaaagatgctccgaaccctcctggccgagacttatcaggcacactcgcacgactcgcaatcgtacaccgatttgctcaaagctcaacctcccaagtatcccaccgacacccctgccatcatcctcagcagtcgggagcagatggagaaggaaaagtcgtgggccgaaggccagaggagcttggccgaggagatcaccagtgaaacggggcgactggactggcagatcatcaagggcaacgtcgggcacgatctctgtagtcctaccgggggcaaagacgcgcgaggcaggagggcctgcagtcgagcgctagtacacctgttctccctcgaataagagtgtatcgaaattcggaaaggtagccctctcataaacaggttgtcaaaacgtctctagtcttgtttcggttctctatgatgtatgacctgcccaacatctccatttccagtttccaatcgatatcgtcatccactggcctagcctgatcactctctcaggcgtaaagtctgcggatgttcgtgggacctcaaacagggcaatccagcttgcgagactagagctttggttgagatcgatgggtagaacggctgtacagtttgctttctgggtcgaatacttgctatatacaacagggctgagggaaacatctgacaaaacgtgtcaatctcctctaaaagatcgatacaaagaatgacttgtccccttccttcttttcggatcccttggcagccatggccagcaatgggtctccagtcgaagtccggatccgctcgcaagttgcgggagagtcgagggtccaatcgcccttgattccattgtctgctctggcagatgtcaaggcatgcttaatcgcaaagaacactgaacttcccaagaagaggggcggctctcccactccctttgaactttgaatagttcgtaaatgcgcggtcttggcgtctttggctttcaagaacgatatattgaactcgcgtggggtatccagcgcggcaggaattttataggcgcctgaggaatgctcaacaacgtcagcatctgcttgaccgaatagagagtagcggagactgcgcttacctggcccacgcgtagcaagctgaccgttgttaagccacaagctttcctccatggtagtgagaccgaaccctgccatgacgaaaacgatcagcttggccgtagacccactgcccaaagcgcctgcgcctaccttgagtgaaagcgccttcgatctgaccaacgtcgatgcttgggttgatgcttcgcccgatatccatatgaacgtcggagcgaacgatcatgtgatctccagttagaacatcgatctcgacttccgaaaccgcggcgccctgggtgaagtagaagaagggctttccctcacccgtaatccacgagtaaccaatctcgggtgtttggtagtgaccgtgcgcttgaagattgactcggtcgaagaacgccgcgtgcgccatctctgcccaggtcgcgttgggcatcctttctcggtatggcgcaagccttgcgttcaattgctcgcaagcatccttaatagccataccgttaaggtctgagcctgcactagctgcggtggcagaagtgttgacgacggtcatggtattcgtctccataatatggattttctcgattggacagttcagctcggtcgcgcagacttgcgccatcttggtatgaagtccttgacccctgaatagcggaaggagaggtcagtttcggtgccatctgaggcagcatcgacgtaggacccacatctcgacaccgcctatagtttagtggaccaaggatgacgacgttagagacgcttaggcaacagatgcaggatacctcgacttaccatgccatagactgacggagccgtcgtgctggaaaatgttgaccagtgcatgtgcttggttcaggaagatggccgtgaaactgatgccgaatttggttggcaaaattgcgatacctcgtttcttccacttgttgttggcgttgaatgcctcaacagcagccttgcgtcgatcaaagtcgctcgactcccgcacttgcttccagagggtgggcacgttccagtccaagatctcctggccaaagtgagttcgatcaccctccttgtacatgttcttttcacgaagcgtctcgaccggaatatcgagcttttcggcgacccgagtcatgatgcattcgttcaacatcatgccctgcagggataatcgctgttagttccttctaaaagcgggttgaccgatgatgctcacctgcggtccaccgaaacctcggaaagcgctgtttgacatcgtgttggttttgcaaatcttaccccgaatgcggatgttcgggatcatgtaacagttgtcggaatgcgtcatggcacgttcaagaacggcctgactcagatcctggctccaacctccattgttgtagatgtcggcatcgataccgacaagcgtgccatcattgttgaatccgaccttgtatttggcggcgaacggatgtcgctgtcctgtcgaaatcatgtcttcatcccgatcgagcatgcatcgaactggacgacgtgttttgtgtgcggcaacggccatttgagcagcgagacagatcgaccggctttccttcccgccgaacccccctccaagacgtcgcacacgggtcgtcacgcggttctgagggatgccaagtgctgcgatgtaggaatttaacagctgcgattctctgcgaaagaaaatgcacccactcacctgacgccacaaatacctgcgtttccgacgggttctgagtgctgctgaacacctccatctcatcctcgggatgcgggatggcgagcgtggcattcgtctcgatgtaaaactgctcctgacctcccatgcgccaccatccctcgagcacgtggtcagcctgatcaattttgctgatatctcctcgttccaacttgggccgcggcttgaaaaagctatcggctgcgatggcttcatcgatggtcaagatgtagggcagttcctcgtactcgatcttgaccgcccgtgccgcagcttgagcttggtttttggtctcggcgagaatgactgcgatgacctggccgcaagtgaatacctcgtcctcggcgaacaagacctcgtccatagcgggcgggttccaaatgttcgatcctggcaaatccttgacggtgacaaagtcgtgtacaccctccatctcgagcgctacctcggcatcgatcgagatgatcttggcgtgcggtttctgcgaaaacaccaaagcgcctacaagctcgttgtgttggtgcggaatgtcatcgcagtactgcgcttctccggttacatgcttgaggtgggccagatgagggatactctgtcccgcctttttggcaagcacgacatcttcgaggtcctgcttgccggtacacagtccacgatggatttcgctgtcgagcagctcggacaggttggtcatttcagattccagcgtgacaccgagctcagtcgtcacctcggcccagaacttggcaaagaatcccatggccagactcttacggtagacggccatgcctccgggcacaccgtactgcaagggaaagtcgacgcccgagagtctctcaagagctccatagaatgccgtgtcgttcccgacctccttgccggtcaaccacacctgcgtctccttgctctcgaccgtcgtcggggccatgccaccgtagacaagcctgacgtccttgatcgccttgccttcgacttccatgcgcaagcaacaggttacgatggcgatatcgtcgtcctttcgcttgctctgcttgtaggcgcgggtgaacactctgcgtgtcccatcctctgattcgtcgggaagagggacgaacaggttggtcaccacggcacctcgtggcaaggcggttttacgatacccgaggaaaaactcgcgcatgttgacgctcttttcctcgggcccatctgtacgatcatcatgttgatcctcgacgtcgacatacttgagcgtcgcccccgtggccacccagatgggattcaaatccgagattggcgaggccgtcgtgatgttacccgcgaggcaggcgacgttcctgatctgattgctagcaaagtgtttgaggttgtccaagatggaatcgaggaccatgaccttgcccctcttgtccttgaaatccctcgtcgttttgagcgcctggcataccttgacgagatcgctcagtggcaaggcgctcccgatatgaagaccctcttgaccggtcttgatcgtggcgaggtcccggatatgatccgacacgaagacggatactgcgaaccggctcgccttgaacctgacctcgatcccagtctcggtgttaccgctcctgatcttggcaccaggataacgtcgcatgacgtcgacgagcgaggtcaacgaacctgggcgaagccagacgttgcccagcggcgaggccgtcgattcgggatcccgctcgtgtccattatcgtcctcgtcctcgtcatcgtcggccaactcgacgggctcgcgtcgtttctggacgagcaccagatctttccctctgaacccttgatgctttttcaaccagggcgggaagatgggttcggcgtctggtgagtaggatttgaacgtgaacactgggattcccgggatggtcttgtgggacgagcgttcggcatcgttgtcgtcgtcgccgttacatccggatccgggcttgttcttgcaacaatccgatcccttgccgcaaaggataggagcgcccggttgacggtccttttccagtacacccgtggccgtaccccgtccgcctccgatggcggtagcctctttgataggcacgaaatcgtcctctggtttcttggcgaggacgtccgggtcgatctcgccgttcccgttcgcgtccccattgacgtgtccgttcgaggtgccgttgacgtgtccgttcgtcccgttatgcgacgcggcgtcgacgtgcccgttcgcggtctcttcctgttcgatgaggatgttcgggtttgaccctttatgatcgacggcaaacgtcttggccacatccaacagacatctataccccgtacacctgcacaagttgccatcgaacccttcctcgacgtccttttccgtcaatccgcgtcgggtccgtcggggttcaccgtcctgatctccctgatcgaaacccaacccgaggggctcttcgtgagcacctctcaactgggcgtaaaaggccatgatgatcccactggcacaggcactgcattggaaccacccggctttgccgaacctctcctgtagagcgtgtggacgggcggaagagccgagaccttcgatggtgaggacgtgtgcgccgtggacgccgatgaggggcatgaggcaggcgttgacggagcgataacgcgggcggagcgggatcgaggaagacgaggaggagggggagagggtggtaggttcgagttcaccgatgacgaccgtacatgctccacaaccgcctaatcatattgggggtcgagggtcagtgttgcgaatccttctcccccggctgaccctcgagcagggatcgggagactcaccctcgttacatcccaacttggtccccgtgaatccctgcgcgcggatgaattcgagcaatgtcaactcgggatcagggttgtccagctggatcttggtcgaattcagggaaaagacgagggtcgaggagcggaacgaggtgggcactgggaaatcgtgcacggtgcgtgtgcttgcgtcgggcatgatgggccgagactaccggttggatcgtggttgggtggttgtttcggggtatcgtgatatcgatcaatggcgaatttccgccgcgagcctgtttcgtgtgagagtgaatgtgggtatatatatgataatcacaaggtgttccctagtccgttgtcaagatcgacacctggttgcttctcggctatcagcttcctttgtctaccgagccgattacagcagatgatgatattgtttgatatcccgcccttgttgctttgttctcgtagttgtagtaatagcaatgaggggtggtgcaggtgtgatcgatcgatatcgactatcgagatatcaacctgatgcaccctgaccacccaatcgcctcttgtccgattagcacgggggggaggggtggaggccagtttcggttcagtttcggcaaagaaaccacgctcatctccgacgatgggactagcgaaatttgcttccgaaagcaatcagagaggggggtggatccgatccaaccggagcaaaggcaaggcagcagcgaccatgtcggttaatttgcttccgcaaggattccatccacgcactaacgtgttcacgcgcgcttcccccctttgatgattgccgatcagcccaaagagtcgataagacaacgtcgaggcgatcaaacattgactattcattcattgacaaccacatcgacaccgttctacctagctccagccaaccctgcgaggaccacgtcaactcgaccatggatgccttgtacaagttcttgtcatataccaggtcccggcacactgtccatcggtcgatcgaggcgggaccgagcggatcgaactctagcgaacaagactctacctccaccgcgggctcgaccgtctctgcctcgagaccagaatcgacctcggacgagctcgatcaccctgctctcctcacctccggcgagcggttcgctgctcgggttcggagtgctagagaatccgattttccgagcttacgaggtgagcaccctaagaccacgtcgatcacatctccaggagagctgacgcccccctttccagatgtcacctacctagacgcctcggcatcccctccctttcccctccgtctccctcaagctcacacccgtgacctatgcagcaacctctactcgaaccctcattcgcattcagcctcgtccctgaccacggcgagcaaggtggaagacgtccgcgcgagggtgatgaaagagctcttccacctcgaccccgccgggcataccagctcccgtgtggaagcgcaccgtcatcctcatcatgatccgacgaggatcgagcgggacgctcgggacgaagggtgggacctgcttttcacgagcgggtgcaccgcttccctcaaactggtcggcgagagcttcttctcccccctcgtcgccgcccctggggacgagttctgggtgcacgatcaggcgcatacgagtctcctcgggatcagggatctggcccaggcaggtggagctcgcgtgggtgtcttttctctggatgagccagcacgttcggaggatgggctgggtatggcgttttcgaggaaaggacggtcagggtcatcccctggcagcgagacaaaggatctacctgtgtcctcggcgggatcgacttcgcactcatctacgcgaacgaattgtctccccggggatccttctgctgaatcccgcttgatcggctttcccgcacaatgtaacgcttcggggagacgctggttcacccccgagatcttttcaaaagtccgtcggtcggcgggcgaggaggatcataagcggacctatatcctgctcgacgccgcctcgtacctatctccctctcaaactctcaacctatccgagatcccctatgccgatgcgccagactatatcgtctttagtttctacaagatctacggataccctaccggtctaggtggattattggtcaaacgatccagtgcagccaggttgagagaggggaaacggtattggggaggagggaccttgcaggccatcacccccggcgtccatcgggactcgccgggccatgccgaggtcgggtggaaagtcccgaaagacgacctggcgcaaggtttggaggacgggtcgatcaacgttcacgccatcgtcggcatctcgcacggacctaccgcgtgggcagagttgtttggggatgacatgaaggagagggctaggtacgtcaggtggttgaccaggcggctcgtccgcgggttggcgaggacgaagcatgggaacggagaaaaggtcgtccagctttacatggatagtcttgctggtaagagttgggtcgaggaagcggtcagcaaggatgaggccgacgacgacgaggattggccagatgaaagtggagacgaccagggtccgatcgtcaacttcaatatcgtccaccctgccggtcgactggtgcctccgaccgaagtcgacaggctggcttgcgtacaaaacattcatctccggagcggaagacactgtaacccgggattcatcgtcaaccagctcttgaacgggcgacaagacgagatcgtccggcaattcgaggccgggatgggctgcgacgagagcgccaatgcggccgtcgtcgctgccagcctgcgggtcagtctcggagtgtacaacaccccagaagacgtcgacgcgttcttgacgtttatcaagaggttctgggtattcgaaaatgaagctctcgaaggcgaaggcgaggtcgtgcctgacggcagctcgatcgaggggtacgaattgagcgagatcagagtttacccgatcaaatcatgtgccggtcaaacgatcggacgcggtcagggttggacgctgacctcgcacggactcgagttcgaccgcgagtggatcctcatggatagacggacgggcaagggattgtcgcagaaaaaacatccccggatggccctgatcaaacctcgcatcgatctggccggccggcggctgattgttagagctggaggcaaggagatcagcgtcgacctcgacgacgacgatcagaaaggagattcgatggaatcgacatccatgcaggtctgtgtggacaccgtcacacccaggcgatctcagcaataccgtgcgatcgacgattggttatccgacttcctctcactaccgtgcgctctcgcgcgacaggcgggcccaggcaggcattccaagctgggaggaccgacgactgatcgcgtgcctctcttgctatcgaacgagagccctttcttgctattgaatcagcacagtgtcgacaaggtgtctgattggatcgccgaaggtggccggcctgacatcgtcgccaaggcgtcctcgtttagaggcaactttgtgattggtcgaccggttatacctcccggcggctcggccgagggcgcgtttcaggaagacgcggtgcaccggttccgtatcgggccccacacgtttgcccccctcggcgcgtgccgacgatgtcagatggtatcgatcgatcaagacaccggggaaaaggcgcccgaaacctttctgaccatcgcaaagcggcgtagagatcatcgggggagaatcctttttgggacgcacatgatgtggcgagatgaaggtcataacgacacgaacgacaaccgacctatcatccaggttggcatgaaggtaacgatgacgttgtcagattagttggcattcgtgagaatcatcagttgtagcgcatactagcttggtagcccatccgttatcaatagcttgtattgatatctgagtaaactacgcagcttcattatttcttggccctctcaatctcgaacccgcacggcaacccttgtcgtaatagtttatggacagagtcagaatgcttcggcattgcaggcgtctgcctgcctgacccgtcggtgtatgttcaactaatccagagatgtagtcgaggcaagggtctctggtttgatttcttaaccccatgagatagaaatcgtgaaataatcttttggggtagtcgaatcgatcattccaccatttcatctggtactgagctgcgtaaagccatccgccagaccaagttgttcgtgtccagatcttggcagggcctccgattccggatccactctcacccttgggccaagcggtcgcgccgatgcgtccttgacgggaacctcaaggtcacctgcctgtccacgttcgtaatgaaccgcatcgagacaagagagaccggattaagtacacatcagtcggacggaatgggcaccctgtgggagaaatcaaatcccttctcgttttgttgtggtacagtcgaccggtggaatagcgtcgcccccccgttgtcctgcatctgccttggccatactctacgagtacgactcgagagacctcagtgatcagttgcgccttcggttaagggattcgacgtttgccaatgcaccgttagattgagcattcagtttgaagtaatgagaccagaccatcgtgctttcgacactgctatatcaccagaatatcgattccttgcatctacatctctcaaatcaagtaacactgagcctcttttcaaacttttgatctccgcgccgtacgacttcgctcaccgtttgattatggcagatgcacgtacgaccagcctcggttcaaagcgccttccctgttcgagtttacaactatgaccactctcaaattctcagctcaactcccttcggtctgaccgaaactccttaccgagtcgatgacactacgcctcctcgacaagatggacctccctgatccaccgcgatcgttcacctaaaaggaacaatactgcttcttgaatgctgcaggatattgcctgttcgttcaacgcggtaaacccaaaagctcagatctaagtgaaacgtggccaagtcctcgactcgcaatgggcaagctgagacagaacgtgtcactttaccttgcggtatgacacaagctcacaaaaggatcgaccgcgagggtttctactcttacgaaagggaatggaccaaattcaccaaaagcactgcagcgttgatgaccgccagcaagttcgccgatcccaacaaggtcaaacaaggtcaagcggggcaatctgacctttcgttatcggccgtggtgagatgatcgtcggctccttgctgtcgcttcgaacaccacgcctgtttctccagacacgccagcacactgaatgggcagaacctcgagatctacgggggggtcctactcgttgtgattgctgtgaagtacgcggaacttcccgtggcgaccctctcacagaccattctttcagacacacgagggtcatcgattcccttcaaaccaatcaggtcattgcgtatcgctccattctgcatgtggctggtcaagcgatcgccggagaaacagcccgtggaatatgatcttatagtcgaacccgtatgaaccgggatactttaagactgattgtccgaactagccaaacgtcgggccattctccaaacacccgtccgtcctagacgacagatcatcgtctcttgcccttcttctttcccgaagccggtgtactctgatatcgacccgcatcggaacggatcagtaaccgaactgataaaaaaggttcagagaggctacaggcgccgggatctcgctcaccttgccactcccattcgatccttttaccggggtcgataccgccgatcctacgcgttcgagattttccgcgagttgatcgcccatccccttgagatcgggtgtggtctcgcccgtcataggggtagacgtcccacttcccttgatcggagtcgattgacccgtcgagtccggcatctgcgctgcggtggtggagggggtggtagtggtagtggtagtggtagtggtagtgggtttggtaggggtaggtgcgggtgacgcctgcatggtcattgtgctaggtttcgatggggtctgcatctggggttgaccgttgtttgagatgggcaatggagcgatggaagatcggaaagtcggatcgaggatcttgaatttgcgttctatcgaagaagtgcaggaagtgaggggtcacgactcagcgacccgtccgagcggttccacgacgacacacacgtcgagactcaccttcctccatcctgaccttgtcgatcccgccaagaacctccttgatcttttcccgccctacaatctcactcgcactcgcaaatacccattgaccccaaccttgcctataactgttggcctcgctgacgacatcgacgacctcggcttccatctccttttccgcggcggcgaaccttgcctggacgtcctcgttcaatccgcccgattggatgagcgcggcgagggcttgtttcgagatccgaagacggtgaatcctgcgtacatcctcaccggcccggaggagaagggcggccatgaggatccgatcgtcgatgggttgggattgttgctgagacaacagagagatgtagaggtctctcggtcggtgagtggggaaccagggttccgtcgtcaggatggcggctatcgaaagtgtcgtcaagtgtcagagatcagctagggacgctggcatgagattctaaagcgggaacgcaccttctttgctcttcctgtgccatttgctgaacatgtacagagagcccacgaggatgctcacgtacaaaaggggtacgtagatagggagccccatcgtactgcctataatttgatcctacgttcagatctgtatgcctaaagtgtcgatgttgggtggtgatactactgaaagtgaaatggtcatttcgaacgatctgatctcttcctgatccctctgaatcctctgatcaaagggttcggttcgagatggatggatgatgtgtcaacccagtttgagcctgacaataataaatgaccgagtgacgtaaagacaaattctgagggggagatcaaattacatccgaaagaaacgagaatgtcagcttcacggaaacctgagctcggagctaaaatatcgggaccttgttttggttcttcgcgttttcttgtcaagtcgcgagtcgcctgtggggctatgctgtgtggtggtgcctcagatcgcaagtcatcgtgatcagaacctatgcggagagccgctcgactcaagcaagtgacaggttggcatggggtcaactgcagatcgtgtcgacgaatctgatcaagctcgtagctcgaggagggcgtaggtggtagctggtaggtggtacgatgcgacgcctgtcagagaccgagagtcgaggctgtgcgcgcaaccggcacgagcgtgtcgttcgttctgttttgattttcagacgtttgtgcgtgtctgtgggattgcgtcaacgtgccaaggggggacgggacgcgtttctcttgccaacgccgccctggccctccctgccctgctctcaagccggccgcctccgctcggcctcgttagctcccagaactctttatttacactaagctgtggtctggcacaacgactttcgcctcgtcgagctcggaaaagtgatctccccccttccctcctatcatcgtactctcttttcagatcacgtctgatcataccagagcgagacaacgaaaccttctgttcctcgccacctccttcgttctctttcttgttttcttttctctttccgacaagagacaagacgagcgacggcgatcttcttatccaccttacgactcttactcccctacacgaaatcggaccagaattcgcaagtacgcacctcaactgagacaagaacgacacacacaaacacacacacagcatgtcttactacaacaaggcctcggaatcccggaacgggtatgatgagaattacgatctagtgagtttccgtcacagtcgccttcggtttgagcctggattgtcgtttgcgagggggaacgtgcgggtgggctgtgcatcgagacgagggtggactccgtcgattgatgatcagcgaatcctcaaaagcaaaagatcaaaaaggtgacgagggggacgcggggtatggagcagcgcgacgaataggggtcaatcttgaaacgatcaaaaaacaagggggaaaagggaaaagctacctttctttgggcaggtagcgcgatcaaatcatgagccacggggacggggggagagggaaaagaaaaagggtcaaagtgcagacaacgacacaccatccaggccacacaacgtcgtcgcgtcgtcgtcgtcctaccgatatcgcacaattacagacacagcgactcgctagactcgaggacgcctgatcttgagcacctccgagcacacgcctgtcaagcagacggacccccgtctttctcggctcgaccttctctgcttcaccttcttgaacgctcgccactgttctcttcacacgcatcacatcgaattctcatcgacacgtactgactcttcctgatctcgaccttgtgacacctcgcgtccatcccacgctcgcccgccatgcagcacaacacggcaggatacagggatgaacctcatggtggatacggccagaacaacgggagctacgcttcggtcggcaacggtagtcaatgtgagtctcgcgagcgtttcgaccgggggtccactacaccagtctttccgttggactgaccacgactctgtcttccctgcagaccccatgtcgggaccaggcgcttcagcttcgtccaacccttacaaccctcagaagaagaagtctaaccgtaaaaagtggatcataggaggtgtcgtcctcgccgccatcgtcatcctcggtgccgtcctcggaggtgtcctcggatcccgagccggtgggagtgacgacaacggtagcagcggcgggtccaacacgggagattcgaaccagggtgggaacaataacggagccgccgagccttcttcaggaggtaacgccgggactgggaacagtggacagacgggagccaatggacaggcttacctggccatttcgaccgatgccaactcgttgcccgtttaccctaccgctgtgagtcgcaaaccaggtcgacgcacgaacccacggacccgtacactggctgacgcggtgtttttcgaaaacgatagaccgccacttcgggctatgctgcccctaccgccgtctcgtcgggcgctgccgcttggcccactgaccctgaatccccgagcacctcgtctcctcgatcccacccccgactcttggctcccgcttacaagtggcaggccctgcgatcgggtctgatcgctcaagacccttacctcacccagtggaacgagaccatcatggccaacgcgcagaccaaccgcggctctgatctcttgaagtacaagctcgacggcgggttgaccggcagtggagtgctcgatatcgctcgagagttgaaggttcgggtcaagaactacgggtacgcgtaccagatgaccaacgataccgcttgggtcgaccggacctttttggaactgaggacatgtgccggtgacaacccggacgttccctttgggaccgacaacacgcgatggaaccctcagcacttcttggacgttgccgagtttgcctcggcctacggtatcgcttacgactggctccactctgtctggaccgacgagcaaaagactcagatccggggttggatcatcgactttggtctcagctttggacaggccgtcttcaacggtaccgccgacgccaacaccgtcaacacttggtggacccgaggtggcagcgatcccattgccgggaactggaactgtgtttgtaacgctggaatggccatggcctcgctcgccatccttggagacgacaccaccggtaccgccgaggccgtcctcgggtacgtgcctgacaatgccaaggccgcctgtatggtcgccgtccgggacgatgggacttgggccgagaccccggactactggtactttggaaccaccggcgccgccgagatgatctctgcgtttgtcaccgcgtacggcgatgatcagggattgctcgaatccgctcctcagtggaacttgacgagcttgttccacatgtacaaccagggcatgacttacaagttcaactggggtgacaacggtcccaacaagttctccgccaccgccaactcgctcttcctctgggccgagcgattccaagagcccaggtacgctttgtaccagagggaccatgccgacgctgccgagccttggagcatgttctggtacgacccgtcctatgagggtgcctggtgggccaacttgcccctcgaccgcgactttgaagacgagcgtgacgcttgggcgtcgatgaggtcgagctggaccgagaacgatgggacctttatcgccatgcggagtggactcttgaccggtcatcagacccacggcgatctcgatgtcggtgactttgtcatcgacgcgctcggtcagcgatgggccggagaatacggttcgggacagtacctctcgaccgattacttttccaacgagacccagtcgtcggccaggtggacttattacaccaaggcttcggccggtcagaacgtcttgttgcgtgacggtgccaaccagctcgtcaccgcggcacccacccacaagtttgattcgaccggtgaggctcagagtgccgctcctggttacgaggttcccgccggatcgtccgcctactacaccaccgacatgagcagcgcatacagccaggggtgagtccggtctttacacttggcactaaagtcatccatcccacagtcgactgattcgattgttatcattgcatagaaccttccaacgaggtcttcgattcatcaacgaccgaaagcagatcttgctccaggacgacgtgactggtgccggtgccgaagttcagtggcgtatgcagaccaacgctacgatcactttcggcgagaacaacaaggtcgccaacctcgagctcggaggacaaaagctcgctgccaggatcctcagccccgacagcgctacttttgccgaggccgaccctgtcaaattgcccggcgaccccgcttcgccccccgaggcttcttacgagggcgaaactttcgacggtaaccctcctcaccccgacacgagggtcttgaccatcaccatgccctcggggaccgacttttcgcttcaggtcctcttcaaccctgaatactcgggtgacgcctcgctcatcaccccttcgtcggtacccgtgaccgattggtcgaggacttcgcacaacaactagttgcttcggagccgcttatttgggaccacacgtttgggtatgaccgccggatttgatcggatgaccttgtacgaccgggatcagagagatgatttcctacacctagagaacaacacacgccgccacgccccgctttacggagtttcttcggtccctctgtagcatccatttacatgaacatttatgatccttgcctgccggttccagtccccacttcacggaggaatgtcatgttgcgagatactctgttgccgaacctcctttcacgagatatttggttccgtccagccttgaacgtcatcgactcggaatcacaaacgcaagatatggaggaatcatgattgatgattgttggaaaagggctcaagatacagcaccagtgcgtcataacaagagaagacatacatcctggggaatttgtcattcctccccaattcaacctcagcgccagcataatgcaacggtcggccacgtctcggctcgctggcctttccgtgcctccgggcagcatagctcatcttggcctcaactcgcgaagtctctctgcttcgctcttgaacctgaaggcagagcaacagccatccgatggtgaggactggggttccaatcgaacagctaggagaaggaaagagttggatgagatctctatcgattcggctagcggggaaagtctcggcgacggaccggaatctgaagacgaagacgagggagagatcagtgcgacggccgagttcgagccaaacatcgagggagatcaatcgcctctggtcctgacaaggcccatcattgacaccagcgatgggatcgatccgcgtccccgttccaggcaaacgagtcatagccggagctcgagtcgatcgagcgatgcctcatcagccgggacagtccctacgccgcgatcaccaccacccacctacgagttcgcgaccggaccacccctcactccccgagctcaacctgaagctggaccatctaactctactagcgacaggtcgactgaagccagacgttcgcgttcttcctctccccgccgatcaagtcccgctcgaaatcgccagtcgacggaagaagaagcgatctcgagcttggaagaaagtctgagctcgctcgtgccagcgttactcgagcgggtaccttcatcgagctccgagaggtctctcttccgtttgttcgacgagcaagcgttgagacggggtgcgatcaaagttttgcggacggtctcgaccgaggggaaagcggatgaggatgaggaggaagatcctaacacgttcgagctgagcatctcggatccaccttcaccgagatcccggtcgggttcgatctcgatgccggggagagaagacaagggcaagacgagaggaggagggaggggcaaacggcatatcaagattgtcgatcggagtggaggggagtggcgagatctcgtcgaacggcctgacgaggaggtcgaagatgggctggatggagacgagttgtcggagcgtatattcaaggaacaattaccggcacatcagacaacatcagaagaacgtgtcgaggaccccgctcgagcgccaagcaccccgacattggtgaacaagcgtttggacctagagaggtcgagatcttccccgcggatcagcccgaccagcggtaagacgtccgaccgaccaccattaccccgacagcagagtagctcgaacgcgtcgaactccggcgaaccgttcgccagggatgtccagatcaccgggtggaagatcgtaggcggggagaccaaggtacagaaagatcgaccgggaatcaagtcggggacgccttcaacggggaatgtaagggattacgtcgaagtggagcggggcaagattggagcatttgtcggtgagtgcatggaagtgattgatcctaacaatgccctcccgctcacgaaaccgatacgtggtctggcagtgtacgaatgcgaaatttatctacggcaaggaaccaaggtgacgaggatgcggcgatacaacgatttcgtcgatctgcgggacgcactcaagtgggcgtttcccaagttgaggtacggggggacattaccgaaactccctccgaaaaacaacctctgtgagtgcgggcatggcgtacgtggttgaccactcggactgaacgcttccatctcgtgtcatgcgaatctatgcagcaaaattcgaggcgaagttcctcaaggatcgacaggctgggctgcagtactggttgaggaccgtcttgttgcacgaacagatgggtagcagtgcccaggccagacaatgggttctcgccaactagcgcacggagtcttagcagggtgtgcaggtatagcggatcaccaaggagattgggttataggttgtacaaagatgaaattgtgttgtatacccaatcgtacacgatatcgtatcaagggacttccagtcgatcccttggatgaacccttgcacgtatacttttacatgattgaccgttgcatgacgacgatcagatcatgctatccctcctcggacctctaggattcggatgacgtcacgaaattgtttccgcgtattcgctttggctcgctccccgtcgacgacctagttgctggtttggcgatcgaagcccagctcgactcgtccttatatagagtcagctatcatcgagaatcaaccgaacactggagatcgtccagttcgcaccactttattgaccagattgaagtaccactttgatatcttcctcgacatgtctcaattcttccgatcgatcaccaccgtttcgcgacaggccacccgcgtcgttcgacccgccccgtccaacgtccgatacatcagcgtcacccacgctcgattctccgccgctggatacggagacgaccctaccgagggagcttccaactctggaaccaagaccccggcttcttcccccaaccctaccaagggtaaacagggcaagcagggcgggagcaccgatcccgaggtcgcccccaagaagggatcgaccgggggcaagactggtaccgccaagggtaaacaacccggtggagacaaggttacccacagtgagggtaagtccgactcaaactgatcgtgcgttcgttgttttgtcaaaaatcttgcccgtgaagaaagactgctgatggtcaacaatcctgccatcgtacacgtcgcagatgtcaacccagaggtgaagaacgctcttggagctgaatcgggaggcaaggacatccatgaggacgggaagtcggacaggaagcctggcgagaccatagcagacaaagagaccaagctccccggaaagccagccaagaagaccgagtgatgttcgatcaagggagtcgggaggaggtcatgggaatgacttcggaatgattacgatctggcatggagcgaaagactgcgacaaatatcgccacgcggaacctttgtataccaaatgagacaatgatcgagaattatacaacatgccaaaagcacagtacactcttccttcgacattcagcttgccgattcgaccaggctatgacggtccattccggaacgagttcgagcgcttggtccctagagggttctcttcgcggcctagttctaccatcaccaggtcttctttccccactgccttcgaatccgactccccttccaccctcgtgactgcatcttgcggtgtcgactctgcctttgtctgtttcctcagattcctgccgccgtcccatccgaaccatttttccgcatgtggaccgcgtgtgaagaggaccaagaacgccaaccccaacaggccaaccgagaacccggagctggccgtccatcctcctagcgtatagagttttgcgccgaccgaagtacccatggtctgacccagaaaaagggagatgataaaaaccgaattcaagcgggctctcgcttccggcttgaggctgcgacattgtgcgttgtttcaggtcagcggcccggccggccacggaacaggataatgacaaatagacttgcgcgtatattcttgtgctcaagctgacttgaccgatctgcaagccgatgtcaagtcctgtatcattttcttcttagccgatcgttcggtccgggtgagtttgtcaaggctcgactcaccaaagcaaaccacagcgaccgctccgacggatcgtttcgctgcgcctgtagcaatcgccatggagcatatctgcaccagaaggcacgttataaacaaggcgtggctgacacaatgccactatgcgtctatgcttacctggatagtcagaccgagcaagatgcccacccaagtgacgagcttgtcgatcagtcgtccagtaaacggagccaagcataccgcgaggatcccgatcaacccaaagagaccgatctggaatgggtcatatccgtaaggcgggtccgaaaggagaaacgtcaacgtgttccaatagctttgaaagacggctgcggtcaagaatccaatgagggagcactggaccagtgtcgggaacttgtagatatacgtcaatatgctccatagctagccatacaaagacgtcagctgatcctttgggtacgcgcagatccgttccggcttaccatctcgaaatacgaaatcccttgggtctttggcggaaagtctggcagggcgaagtatagcgagatccaggtgactgcaagaagcaaacaaggtcgattttattgcgttttatggaagcgagagccgcatccgactcacccgcttgcaggccgactgccatccagtagacatttctccagcttgaatagttggtgatggtcccactcagaacccttgcgaccaaaacacctagagtgagtccgctgagcgtgatggcgagcgcttgggcccttttctctggtttggccatgtccgccgtcaggggcaaaacgatctgggctatgagcgggattactgtcaagtcagttgctttcaagaccggacttgccaaatgcatcgctcttacgagtgacctgtgcgactgtgtgtgttagtgtcgctccacgtgagattcgctacaccgctcaaactcacggttagcatcgccgtgaagaaattgatgatctcgaactgtagcagggtttgactcgtcgccacccctacactgagggctacggtgcacccaatcaagagcagaacgaggctcctacggcgaaccagatctccaagtgggctgatcaagaggatccccaccgcatatcccgcctgggtcaaggttggcgccagcgagatctcggcatacgacacgtcgaatgtttccgagaggtatgacaggataggctgggcatagtaaaggtttgctaccgtcgctgtagacgcagcagcaaagaggaaattaagcgcgaggccgaacggaaacggtcgatctggatgatatcgcagccgttttggaacaggcaacacccagagattggtcgtcgagacctgtatttccacgctcttggtcggtacggtctcttgtccctccagagattctgacatgcccatagtggatgttgagtccttaggtgagcatgactttaggtcaaagatgaaagaagtctacaattagcgaactatgacatcgtcaggtctgaaggcgaccagagtgtcctattcgaagatcgatgtcggcgttgacgaaaatggttcgtcttcgctctttctttcccccgatcgcgccacccgatcgacctcctccactcttcgggcatcgccgatgacgagttggtattcactacactctcacactccctgtcgaacatatagactcacagctcactccgaaccaaatctgcagcaagtgagtaatcgcagaatacccaaatcagttggcggctgggatggcttcataaatgactcctgacgccgtagattgcttgtgggaagcaaatgcaatggcgatctgtttgtggtaagctcgcatctaatgaggtaggatgtccccgatatacaagaagcaaacagctgaagctaggtattctgactgatcttgatcaagcctacgatcatgagaccgacgaaggaaagtagcgcaaatacttctcgcccggaatctagacgggaagccatgacgatacacgcgcttagggcagctgtcaaagagagacaggattgaaggctgcggaaaccaaatttttgcgtcaatgcttgttatcggtagttgacagtcgaatgagtgtacctttgcgatttgtcggccaacgtcaattcaccgattgaggctctgcggacaggctttcgtttgcttcgatcggagccagcaatctccagttgactgtcttgtcttccgaatcctacgttggcgccgaaccctcccaatacgctcgccagtaaaaaaagagcgcctgccagaggccagatcgagtccgaagttgtcgccttggtaagcgacaacaacagcggtgaacagatataaaggacaaaagggggcagaagccaggagagcgtcatgtccggtccgtccaattcctttttgcttcccgtgggtacgtgcgattgaaccttgttccactttagtgccgatgccaatataacggctccagcgaggttgaagctattaagatgagacgctcgaatttggtccagaagcagcgctcggaagaccaggacgaacaaggcgacgaacgaaaagaacgtgatttgaggcacgatctccggcttgagaagcgttataatggctggccctttagggcccgatgctaatcatatcaaataagctcgtacgttcccttgcaatgataaccatgtcgagccgtggactaaccttgtaatttctggcgctcttccgcaaggaacgattctggcacgtagtcatcatcgtagccttcctgccttttccaaaggatccgctgccagggctcacgctcgaaaggcatcgtagacggtatggacagcccaagggcagtatgctcgtctgagggtgatgaacttgctatgccagagtcgtttccagtctcgtcctcggtgatcgccccgtcgatcgaggttgcctcttgtttcatcggctcctctttcgctacctcatccggtaacacggcatccacgtcatcctgttctgggccagacgtgggcagcacgaacggctcagcttcggtgtcctcgtccggagatgaattgttggaagatgactcgacgctgtccacttcacggccatgttctgtagcgacagatctggctttacgaggagtctcggccatgatggtatcatccaagttttcttcgtcctcctctgtcacccgaagctctcggaaagtcgaagtgttccgagaaagtttgggctttggtgattgcattccgcccatcagaccgagtctagatagtagatcttgtcaggatatgcgctctctcgcatttcggagggcagtcaccaaacttacggtgaaagcacactgaacagctgaccttcttccctctgaggtccccaagattcgaatgggtctggtatcgagctcaacattgtctctaaggtagggtccgttgactttgctgaagtatatggatgagatcagtcacgttcctgacactcggaagtcctgaaactcacaagcaatcttgtcatatacgtccatctcagctcgtgtcacgaatacggtctttgctaatattccgctccacagctgttgcgaacatcagtgcatgcgcatcaagtagggagtaggcgaagataagcttacctcatcttcagcttccagcacttcttgataatgcgagcctttcaggcagtccaagtcatctacttgctgttgcaacgccacgagcgctgctctaaactgctgtagatctgtgatttaaggcataagcgagcttgcaccatctcgcagagagaaccggcgcacgaacctcgtcgttttttgcggccatgccgtatattgtcgtgctcggtcttgcgtatcaaagccgacttgacctgcagagctttctcgtactgaacttgtcgttcctacccgtggatcgcagatcttcagatctagcacgcagcaaaatcagaaaggatgaagatgctcaccgtcactgccgccctgtagtcgtccagcttttctaacagaggtatttcgaactcccgatagaacgtatcgccctggaacaggatttgtggcctagctgtgtaagccgatcgactcacatcgttatcaattccctcacttacgatcagctgctgatgtgcgcccatcatatgtttcaatccactcagagccattagaccatccgaagcagtatcacatcccttgactcgagagcacgcctccaaagctaaacccagagccgaagtcgctttcgagattgtcaacaaggcttgacggaaagatttcgcttgttgcgtcaactgcgatacgagtgtgcttagcacttggatccagacttcggccaaacatgcttgagcgcacctcttccaacgctgctattgacttccggagatccgctctcgatatcaaaagatgtggggggttcgtgaagtccgctcgcgaagctgtcgtggcctccgaacgctgtggcatgggacgatcagtcttccggcttactgccaaagccatcaaactatacatacggtcggactaggaggtctcagacgagcccattgcgaccctccgatcgatgacatgctcgactgagcagagtgcagtttcggtcgagtctccatggcgtctgtcgttcgagttgtgctttgttatgatctcgcaaatccagaacaaggggtaaattgcgtttctccgaaattgtcgcggcacacaagcggatacagctatcgagcgtgggtagagaacaaaatatgaatgaattatcgaaagcgatgagctagacggcattgaggagcctgcatactatccagatgcaagatgatgaggatgctctcaatcaggaaacgcccaaagtcctgcaaccatcgtgcgggatcaccgagcaatctcgcgtcgacgactggctccgccctcggcttaatcacgtgatcacgctgtaagtctgaagctcgaagtacgcctagatagccgcaagggcaaacggagcgattcaggtccgtttcaagcgagaagcataaccgaccagtcaattcagacgatgaataaccagtaggtcattcaagccgataaaagccaaaagtgccgttgcggcggcgacttcagaacatagatttcgactcatcttcataggatcataggataaacaacgcattacatgacaaatttcataaacccagtcgttctgattgaggcaaccggactttccgccctacgaccgcatgatcagagatcggggacccgagcgggctcgatgttccaaagctaatttatgtctgttagcttcagctcgttcgaagccgatgtagattccgctcacctcttcagcatactccgcgacagctcgatcactgctgaacttgcccatcctggcagtcgtcaacattgcgcgcctcacccactcctcgtgattgttcgtaaagaggtcgtcagccaaggcttcggctctgagataagattcgaaatcgttcgcgaccaagtactgttttcgcgcggatcgtaagcgattcgagctataatcgtccagactgaagcggctcacatgatcgacgtgttcaacagtgtagagcaagctcgagtaattgtcgccgttcccgtttccaaacattccgcccttgatggcatcaaagacctggattcaaggacaaggttaggcttatcgttggtcgcgttgcgcgctagcttcactactgaccttggccaactcggcgcagcgctcttgcaatgacatggcttggtacttgttgaggtatcggacgtgatcgacatcgggcgtcaagtgtccaaataggaaacattgctcctcgtcgacttcctctgcgatctcgactgatgaaaggaacggctacgtcagcatggctccaatcccctgaacgagacgaatcgaattcaccattggcaccatcgacgctgtgtgacacgcgcgcggtcaaagtcagaaagagcgagcacgaaactcccggtgaatactcacgttcccaacatcaaagcaccgttgatactgagcttcatgtttccggttcccgaggcttccgtctgagagaacacaatgtcagcaaatcgagattctgcattcgcaacctgagcagacttacaccggcagtcgagatttgcacactcaagtcagcagcgggcatcagaacctcggccaaagagacggagtagtcggcgagcatgacgaccttgaaaagatctccaacctctctgtcgttgttctgtatgcggccgcactcaatgacgggcgcccatcacgattccgaagtcgactcaccacaacgcgtccgacattgttgatcaattgaatcatgagtttggcctaaagaaagagcagcgctggtcagcaaggcgccggtgccgagcggccacacttctcgctcaccatagcatatccaggcgcagccttgcccgcaaagaaggcgacgtgaggggtgaccttcttcctttcggaaggactcatgttcttaatcgtcaggtagcgatggatacatccgaagatgttcaatgtctggcgcttgtatctgaatgcgggacagatattactgagcctatgtaaaatcataaacgttttcgtgatcttggaaactcactcatggaaacgtttggcctgaacagtaaacaacgcggtcgggtcgagagcgattcccaattccttctcgacaagctcggctagcctcaacttgttactctccttgatagcctggaaagacattcggacctgagggttctcgacgaacggttcgaatttgctgatcagactcaaatccttgagccattcgtctgttccaatgcacgaggtgatcaagctggaaagctcggggttggcctggtgcaagaaacgtcttggggtgatacctgtgatcgccaagagttcagtctgagcgatcacaatcgcggtcaagcggagcgacgtaccgttggtcacattggtaaacttgctggggccgtagaactctacaaagtctttgaacaagacgctgcgaacgagaccagagtgcagagcagcgacaccgttgactgtccacaagaagcaaacgtgagaatcgacagaccctcctccctgtgatttcgcgactcacccttggtggttccgacgactgcgagataacccatgcgaacccttcgaggctgactctcctcgataagggacatccgcgacaagcgatcttggtcacctgggaacttctttgctacctcttgcaagaaggaccagttgatgtcgtagatgctattggggagcagcagaagacgggttgaacttagtaagagctcagattgcacttagcctcgatcacccacatctgcatatgcctgggcaagaggtgctccatcaaaggtaccggccatgtctcactacatagaagtcgtcagcaagtcgtccagctaggacgtcgattggtgcttacagggcctcgggaagaacagtgtgattggtgtaaaagaagcaagccttgacgatagcccatgcctgatcgataccatgcacccgcctatatcagtggcaacattcgcaatttctcttcacggctgaacgcacctcgtcgaagggcaagtgttcctcgtctaccaagactcgttgaagctcgggaatggcgatgatagggtgtgtgtcgttacattgaatactaaccatgctaggcagctgggaccaaggcaagtcgagctctgtacggaagcgctttatcagtatcgcgataggggcagagagacgaacggacatactcttgtatcgtcgcatgatatcctgcaacgaagcgcagcaccacaaatactgctgcttcaaacgcaactcctttccttgggtcgtattgtcgttgggatagagcacacgggtgatggtctcggccgactgagacgcagctacggcgcgctcgtagtctcctgcgttgaaagactgcaaatcaaagcccgctatcggcttggcggaccagaggcggatgttgttgacgttcttggtcctccaaccaggaatgggtacgtcataggccatggcttgaacttcttgacctccccaccagtaacacctgtctccttgtctctcaacctgtccgaagaaacggacggggtagcggatgtcattcctagcgatctcaaaagggttaggctccgccaaccaagggtccggagcctcgacttgtcgacctggaggacacaaagtgagccgtgagccagggcgtcatggcgacgatcctaggcccagtaccaaccattctcgtcgatcaactgcttgaaaatcccataatcgtaacgcaatccgtaaccccagacgggcaggtcgagcgtggtagccgagtcgaggtaacaagcggccaaacggcccaagcctccgttacccaaaccggcatccctctcctcatccaagaggtcttcaaagttgaaacccaatttgcccatggtctcggcgaccatgtctttcatgtccaagttgaggacggcgttgtccagagttcgtccctgtcctccagtatgaatagtcagtcaccgattgacacttgtcactgtcacatggagacgagcagactgaccatcagatattcgagggaaaagtagtaagctcgcttgggagcgactttggtctggtagctggtggtaacgttccatcgtcggatgagctcgtcacggatggccagcgcgcaagcctggtaagcgacgctgtcgttcgcgttgaagggctgacgagcgagagtggtgctctgagtacggcatgtcttatagggtcaggggacgtgtatctgtctgtgagcgatatgctgggacatacgacgtggtgcacgacgtgggcggcgatcgacttgacgtccttctcctcgtccgccttcaacgcgtctttccaggtctacccaggcgggagcccgaacgcgcgactggatcagctgtcatgatcactctgcacatgccgcgaaacataccttttcatcaccgataggccacttggcctcgggttgagtgccttgagacggatcatagtggcctgttcaccgcaacgcgacgttcatgcccgcgatcagctcgtactcggccatctccgaccaaacagctcaaaggaagcccggcccgcgattgctcacccgtcaagctcctcttgtgcatcctcggcctagcttggaaaccctcaggttccccaccatccttgggcaaggggacaccgatttgagccgtgttgatcttggtgtttgcgatggacgactttcggctcaggacgggagtctgatgtccatggctcgagtggaaggatcgttcggaccggatcgagtcgcccgtattctgaggcttgagagcggcggcagtagggccagattggttgttggataccatggcgagtcgaactgtgttgcccgacaccaaacagggtgagacgaactctccggatttcgggtcaaagcaatgataatgctgcgtacctctgtgtcaagcttattagcggtagctgaagcgtgctgcctcaacacaaagatctctagctcgaaaggcagagtctgaagaaccaggctttgatcgcaccgtataccaactcgatgaacaacggaaaggtattgaaagagtagtaggtgataggtcgatcgttcactgtcgacgctggcagtccgtgagagctgtgggctgagtgcgtgtctgtgtgtgtgagtcctctgtgagtcgctgggagttgtctctcatcatccaaggcaaggggatcaatcgcagcttcgggcttcgggagcaaccgcttgctttgcccaggccgccctctgctatgccgcgactcgccggtagaacgtcacgtcccggccgggcccaggggaaactccggcgggcggatgagaactgtaaattcagacgtcacccaacgctagcgcagtctatgccagtcacgtgaacagagcgccgagcatcgagacgtagcttgcgaggtctcgtcagtttgcaagttgcgggcgatcaatagctgatgacagcgcatcagccatggttcatgaaagtattgcacctgacatcacgacgtagagatgtctccaaggaattttacccctagcgtcgtgtgaagacggcacatacgactcagccctgaaccccccttacttttcgcttgcgctcagctgatgtacgtttatcgagcgatgtgaccgactcttcacaattgcatctacaagggctagccgccccacatcaaaggttcttttcgaaccatgctcaggtgactgttcggcaagtatcgtcgtcacacgttaccggtctcacgcgcaggcgacatgtaacttggtcataagcgcatcaatctgacggtttaaactctagctctctcgacgcctaacccttcttctgaccttctggtgattagcagcagctaatgttggattgggttgatgtctcggaccactagccgcagcatctgattgaggcggatcgtggccatctgtcgcactcacccggacgatcgaacaagaggaatggccggatcgccttcggacaaacccggaaccagattcctgctgagcaattacgtaaagtggctccgagcgggaggatccccatgaccgagggagcaggacagctagaaacgactttacttttgatcttgttcgacctgttgctccggtcttgatgtatacatcccatcgtacatacgttggggtcggtgatcgaagccatagactatccacatcctcgaaatccattcgcaccacttgaattgccattcgagtgggagctattgcactctaccctttcaaagaagagggagacgaatccgccagagtcaatcatccaagaaaaatccctttcgcatcacaaagaccacctaacagcgtgcggccgagatggagacgacgaaaccgatagtccaggtaattctgcctcgacacggaccttcagaagatcagcaagagctatcgagacctccaagcgctttccccgtagcagagattgataggttgagagctcaggaaggcgggaatgatgaggtgcgcgatggggcgagccatctaccaatcatcgtcccggaatcccagctgaccatcgcgctatgtcgtctctcacagtcgtcgggcaggtcgacaccatcacaaccgggcgatcactcgtcacaagaccctgccccagctccgcctcaatatgatgatccgatcccttaccaccctaaaccgtctgtagacctgcctccatacgagccactcccagacacgtttcaacctccgccagagaagtctgcccagaaagcgggcctctcccttgtcggctcagcttcaggggtggctacagacgagaaacgtcgcctggatctcgaggcagtcacgagtgccgtcgatcacgcctataccgcggctccccaattcgacgatcagagatccgagatgagaccttctgggtctagatcagctactatggtcaacgaaggcacagcgataggcaggaagatgagcttgaaggatgagaaggagttgaacaagctcttcgatcagatcgagagggctcacggacatagcaagtgtggtatcctttctctgaggtcaaaggagatgctcacacttgggaaaccattttcagagcttcctgaccaatcgactgagttggatgctgatcgggcagcagaacggaccacgagaaaggtcagtcgctctcatcaaacccgcttttcgcgccaagctcaccgttgtccaccttgaacgatgttgacagcgggaaagtttctaccaggacttgctcagttcgacctcggcaggacggatgcatgatcaggaatacgatcttgccaacgcttctcctcgggtctcgcctctcgtgaaaacgtttgctgaatccgggtcatgcatccaaggggaagatccggacgagtcagacggcaaaagaaagagcagggaggtggttgacattcaccaagccatcagggacgggcctgggcagttgtgaccatatccgtaggcgttcacgatcaagcttccgccaatacatatgtagaatctatgctgttcaggcaaatcatgtcatcatcgatattatacctcagacatcgtgtgaatcgttcgagaagatctaaacggaaccatctattttcgattcaacgatcccgtcgtgcggaaactcttcaacacaatttcatgatgaaagaggctgtgataaagcatcgcggttcaccgatgaatgtagcagaatacgataacattcaagcggtcaccgagaaagcacaaactcgtgcaaacccagcgtcgttcaaggacgcaatcaagctaacgattgagaacccagagaatctctagtgtataatgtcaacggtacaaaagaaaagtgcgatcgaaagcgacgggcgagactatacagttgaggcgaaatcgggcgatccatgaagaggcatctagatgggactctgcgatgcgccggctcggtacaccaacgggtactttcgctccaagaatgtcgagggatgatcccgattccgacgtgaatgagaaaggacgtaggttcccagcggtagagcccttatattcgagggtgagggtatgacggactagactggagctgaagtagagcaggcgggacgttgctgattgctggtgatccggaagactgatcggatcgacagattacatggcctccctcccggaccggatatctgaccgtctaggggctgattttgtatgagggaacaagtcgaatagacttagcgatctgtcacaagagattagagaacgaattggctcacccatcaaagggtggagttgagccatgtaggtgatcgcccacatgaggtagcaacaagtcagggtgagaaggatactcgatcggatcatactacaaggcaacaggcagagtaagtttatcactccgatcgagcttgaaacggcccatgatccgttcgacatggattgaccggcctgaaatcgatcgactgacgtttggttcatgccctttggcgtgaggttccatccgagcaatccagccccgagcgcgacaatagccatgataaatacgaggaaaccagccattttgtgaggtctaacgggagtgtttactgtaatgtttgcaggtgcagctaaggcgggataggtacaccctggcagagaacataatcaactcactttgagggcaacgctgaccgaagggggaggatgatgagccaacctgacattcagtgaggcatttcaagcagaaatgtcaggtagaaaagtcgatcgaatgcgatcgatcaagtgcaacatgaatttgaatgtcctcatcaaatctcatcgagttgccgtcatagcgatccagccatctgcgcatctgaccgttatactgcatcatgaggacttcggcgcgaaattccgtccgagtcctcgttgacttctcaaggttgagcgtcgggtcaggacggaacgcaagtcggacgttcgtctcgacctcgtctttggccaggcaagaaaaggctcccaaggggaccacaagcaatgctacggctaagataggcaagctggatcgtgttcctattgcatggacgactgcgacaacgtcctattcccaggaggcaaagtctttcgtatccgggaatgacaacgacactatcgactctttcgaggtcattgctgatgagaaagaagaactcccaacgagtctgattgcgaggtccaaagtcagacgaggcgtgattgtggagtgtagacggtcagtctcacatgtctgatgcgctcgagtaccctttcaaactgactctgtcgcttgaacagttcttatacgtcatttattggaattgtgctggcgagcgccatcgcttccaatcgaattcgattcatggtcatggactcctctggccagatcatcccttgctctgaagaggacgtccaattcgtgttccgtgagaacgctgccaagctgcgctcggtgaagggaaaggagagggaaacgacgggagctgacgaggtagacctcgatgtcccactcgacgtggtcgacaggtctttctccctcgcggacttgttccccgtagagtcgatgagcgaagccgaacgggcctcgaatgatattgcttttcagaagcgaaacgaagctcgtcggattctcgccagaaagttgaggaaaatccagatcgcagtcgaacgtcgaacggggcggttattacgggatcgatcgggttgtttccagcccgagacgttatgggaggaagtgcatgccgagaatgctcatctcgccgaaagcggcgtttggccgaccttgtcgtgcgaggacatcttggagagacgattcggagccgagaaggacgagatgagcaggtttgccctgcatactatcttgatgtctcggccggacctgttccaagcggacgaaagtgatatgaagatctccggcaagtttgcggccaggccaaagtggatggtggacgagctcgagctcggaaagaaggcactccaagcttgggaggctgcaccggatagtgaggccgcagcggaagtcagacattttatcaccaggtgcaagaagattgttctcgcccgccgagcagcggacgagcagaaccctcagcctgatcctaccctgacggagagtcacaaccgactactgaggctactcaagcaacgaataatggaacagcgaacgattcaaaagtcgccatattggtctttcgtgccggctcttctcggtgccacagacctgtacaaggtcgacgtgctggatatgggcaccctcatgcgtttcctgtgggaaatgggcgaattgagggattctggcaatataaccgctctgaagctgaaggatctggaagacaaggaaggcgagctgcatctgcatccttccggcttcgatcggaaagcacctcacaacatgttaccgtcgtacagcttggagtcatatctggacttgcccgattctcacgaatcacttcggcatgactttggatcgttgcccgtatacgtcatcgatgctgcggacgccaaggagctggatgacgggatctccttggagcggataccagggtcgacggatgtttgggtgcatgtacatatcgcggaccctacacgttggttggctccggatgatgatatcacctcgcgcgccatgcgacatggctcgacattctatgcttccggtgatggtgcgagacccatgatgcctcaagatttggtcatgagcgcgatgagcttgggagcgacgaagggagtgggagcttcacaagtcgtccttaccttctcagccaaggtgacagagaaaggggagatgttggactacaatatcagggctggtgtgatccagaacgtgaagactatcacctacaactcagttgacaaggtgttacaaggaggcagtcaagcggacgatttggatgcaccatctttgcaagatctgcgtgacatgcatgcgcgatctcaggccattcggcgtcggagacttgctgattcaggtctcgaatggtttgtcagcgaagccgaggtcgcaatcgctcgtcccaatgaaaccaccaaagtagagtggcatatgcctgacaatcctcacgcgccctcacgaattttggtctcggaatgcatgatcctcgctagtcaggttgccggtaaattcggcaaagagcatgacatcactctgccttacagaggaagcgctgtcccctacatccctcagaggagtctgccagaaggttggactcccgatatggttattcgtgatctgctggacaagcgggatccagtcactctggccacatcgcagttggatgtcgccaaactcggaatgttcgttcgaggaactcctccgtcccccagacctgtggatcattggattcttggtgttgccgcgcaagatggaggatattcacgagtgacttcgcccttgcgaagatttgccgacatgatcggtcactggcaaatcaaacaggcgcttctgcccacatcgcgcaagcccttgtttgacgagcagtacatggaacgattatgtctctatactaacaaggtggaacgacgcatcaaacgattggatctcgcatccagaggatactggaaagcgttggcggtcaaacaagcactcgatcagggtggcatcatgcccaacggagtcaatttgcacaacgtaacgggaattgtatccgctgtgacagattactctgccgtgaagaaacgccgatcaacctcgctgtacatccccgatcttgcgttgcgagtccagctttcgcagggtgatgtcaatctggaaagagggttgagtcgttgggagattggtcaaccggtccgagccaggatcagcgaggcgatcttatggccgacctcctttgtaaatgccgaaccgctggaagattgagaccgcttgaaggctgtacatcgcgactatgtgatatccgatcattttcatgtagcactcgctcctatctatatccaatacaacctgtatgcgaaacaatcaactgcattcatgcccactgttgtcagcttcttatcaccatcaatctgttttacttcagatcggcttgggctccttgaagatgatgtacgagtattaccagaacatgcagtacttccacctgacatacgtctccgggggtttcaaaacgattctactgaatagttgaccggttcctcttctttatcgacgcacgttagccttgcttcattctcacccaaacgatcgcgccgaatcagagactgtcgagactggattgacaagtggtcgaattcctcacgcttcggaaataactgcgtgatgcacatcgcaaggaagccataacgactatgcgtcgttcaggccgctcccgttgagccggatgccttcctaggggtcccaaaaattctgttacgtattagacgaggcattgatacgaacgaaaatgagacaggaacgatcaatgtcgacggaaaaaacgtacagcggaaggaacagagcgcgcttcacagagctgcagattgatcatgaaagattgagagaacggacgcgtccggactctgtgagtcttcatcagctcactgggtgaatgattgcaccgcttgtagggccagattcaagcggttgctcctaccagacaaaagcttatggtttgagatggaatgcgaaagcaagttcgggaaactacaggcgcttcagctggtatcttcggtgacccgtcgttgacgcgaattaggcagcaaatatctgagttgttcgatgtgctcctgcagattacaatccatatcgctgtctgacccgtgagtaggagcgttcttggggtattgcgcattgcaataacgtgcgaacgcggggggtttcgagtcctcgctattggctattctttggagggaaggaagaggagacttaaacgattagaaggtattcatacgtggagcatgctaatgtcctcagattagcaatttatcggtgcggattcgggatggaagcctcgactaggggcttgcatgctggctatgaacggattacgactccttccgcaattccgtgcttccgtgacgatattgtaatcttattagtcgatcatcgcgacgccggagcggcgctagctagtacgcatgagacctaccaagcccctgtcacgctatcaaacaaaggatgattcagtaatccgatactttccagatgttattatcgcatggatctgaatacccagacgcggaggacggagtcgcatgaaagaacgctcttctggaactcttacactattattgtaatacgaaacaaaacaattcctgttcacttcatcgacattcaacagcaaccgtttatccgtctattgaccatgactatcagcgagacaacacaggattctgctcaaactcagccgtctgaatcatctcaggttcattccaccggaagtgaccaaagctctgaatattcaagcctaatctcagctcgaacttccatcacgagaccttgctactctacttgggcctccatcaaagaatctatcgctgtctggcgaaaagagaaacgcatcgtgacctacaatgatgccgtgcttagacacacaaccttgtacaacgggcccttacacatgggagctctcctggacgtctacaaggtcagactgagcagaaacaacgctggggatggacctgaggagttcgaggcccttcaatgtttcacgtgtccgctgaaggaggacttgggctatctgcgattctgcaacattagtggcaaaaggcagtggtacttcatgtccgcaaccggtgaatatttattgggtgatgaagggaagaagtggtttaggcgagatataaaagcggaagtggttcgcagcaaggtatcactgtcgcagtgggcggacgaggcgaatcgccttctgaattgttaaaggcttgaccatgccagcagctgtcctgcgcgccgtcccaaagttcagtcttaatgtcacaatctggtcgtatccagtagatctgatctcacggtgactagatcgaggcaattgaaagtccagtatcgatatcagatgccgtaccctgatattagattagctggtcatttcggcccggcgtcgattcagttcagactcgcgatggatgcaagttgagttgcacctcgacgccaatatgtcctactagtgttcggtatggtattcttcccctcgcgttccggtcagaattctcctttaccagtagcacgccctcagtgctcgcagcttacagaggctattgctattgaactgccccagcgataagatccacctcccctggtccgccgcagcgttgttgattggatgcactttcctcactgtcgctcagggccttccgactgtgagacagcgcaatagtcactgggcgggcctcttgacttcaaactgggaccttgcgctatgccgctcctgattgcttgagtagtagcaaatcctctcgatattgtgtggcgactcctgacttctcacctcctgccctggacgagtgaaacgaccggtggcttccttcgcgttggtatatcacgtaaaacgccacgaacgcgtcggcgagtttccctgcctgctgatgtgcctgatcttcccctctctcgtgtgactgtggcttcggcgatggaatccttgtcgacgcgttttagcgcgacaacttgttccaaaacttgcaccgcccctgtccgccgtgcttcgtcaacaaaccgctcatggcagccgtacggctctcgtcagggcacacagagaggtgctgcacattcctctgaccagacttcgttctcacttttgcgcatagggtcagacaccctcaatcattgtcgagcaccagccctaccatccatcctcaacctccgaatctcattccactgcgagactggatctccgacatctgctcgacctcgacgttttggaaaaccttggacctccttctacagcgacactctttcagcacgacaaaactcacgactttgacctagtccacctcacctacaagtcattgacctagattccaacctggtattcggagatcggaaagtcaaggagcatcatcagcatgcaatagaagctagtctccaccccgtcctcttgtcccctcttctcaactcctctcagctggactgttgattccacaccaccaccccggccggcccacctctgattgatacagagcgaatctacgtgaccttgaaggatcaccctcgacaaactgaacgctagcctagagctactttccgcgccatcgcatagaccgtgctagtcacgcatttctctgcatctgcaacatactcgacatcccagaaagaacaaaatgtttcccacccttgccctcgtccttgtctctcttttcgtcttctcttccgccgcgcccactctcaactaccctattcaagaccagcttcctctcgtagcccggatcgacaaggcatactcgtggtccatctaccaagacaccttcacgaccacctcgggatcgcttaactacactacatcaacgcttcccgcctggttgtcctttgaccctgtctcgctcgcgttctacggatctccagggaccagcgatgctggcgagatcacgatcaccatctctgctacggatggcacagtaaccgaggactcgttcaagatcctcgtcacgaacaatgatggacccggcgttcaccgtggattcgatacccagatcggcaacccggctttgcacaacttcaacaccgccacggccttgccttccaatgacggagttttactacacccttattactccttctcgatgggtttccaacagagcacctttcgaccgggttatgatgccgtcaagcgggacatcttttactcggcttacctgagggggatgaccgagttgccttcatggttgaactttgacaaccggaccgtgaccttttcgggggtggcaccgaacgaagggacgtacacggtcattgtgaccgggtcagattattggggatacagtgcgatccagaacgggtttacgattcaggtctcgaccgcgtacgtcgatgtaccagagcacgccggcgtgggaaatatcaccacggttgcagggacaaatgtgaacttcaagttggacctcagttccgtaaacgtcaacggagacaaagtggcggattcgagtgacctagacgtctcagtggatttggagggcatggagtggttgacgtttgacgcgtgagtggtcgagaaggtgcctgcgatgcgtgaaggtgtatctgacccgacttgccggacgtttaacagctcgactttaactctgagtggaacgacccctgaaaagtacatcaacgggacgaccagccccttttatgttcccgttatgatcgcggacgaagttgatggtaccactgccaacaccaccgtgtaccttcccatttccatcgagccctccttgttcaacatcatctccttgcctaacgccacggcccaacttggcgatgcgttcagctacgatctcaagccttacatccgagatacaagcgcgatcagctcgcttgccgtgtccgtttcgcctagctccaactacaccgaatggatcaagttggacgattcgtcgttcgagctctctgggactcctcccaatcagagcagtaccattactaggaggatgcatgatcacaggaggagaaggctttacaagcgagcggacgcgcgggctatcgtgagggtttctgcgacggatgcgaggaccaacttggtatcggtcgccaacctcaatctcgaccttgctggtttgcctacggccgccatccctgcaccaacttcctcggagagtccgagctcctctgccactgccgccaagtctagcggcaaaggcgggctttcgacgggtgccaagattgcccttggagtggtcttcggtcttctcggtgtcgctctccttgcggccttgatctttttctgctgttgccgcaggcgcaagcaaaaatcggagcaaaagactctggacaagtcgagaaagagcaccgagagcttcgctggaatgattaaatcgcccaaggccgaccgcaacccattcagcgtcgccaattttgccatgttcggcgccaaccctaccttgccccgaagcgagagcgccaagttacaaaatggcgaggttcccaagttcaacagcatctatgttcagcgacctagcgcggaaggggatccgaccccagtacgagccgcagttgaagagcacaacgaaaagcccaggcagatggacgccatgagggggattttgcagtggggagatgccgagaagagggattcaaacggtacccatcaatcggtgcccggcttggaatatccttcacctgtgcctggtgagatcatccggaacgacagcagcctcatgccgcctggcgaagctagcgacttcacgcacagctttggttcgacttcggagagccgagcgagttgggaaagcagagagactttccaatggtcttcggcagaaggtgcccatgcgccctacatagatgccaatggtcgacccttgtcttccgctccatcggttcctcgtccacgcaatgattttacgccccgctaccctcggaacgctttggcaccaggcatgaaccgaccccctagtgacactttctccggccacacctttagcgaattccacgatcagcatggctccgaagatcacacgcccgacagcttgactcacactcataccggaaccggagatacttcgtttggcaccggaagcctctcggattcgcatactggaagcggcaccatcagtggcagcgggtcaagccccaacggttcatacgaaatcgctcacagagctcccgccgggttcacatcgggtccctccgccctaggtcgaattattggcgaatcggggcacttcgcaccggtagctgaggaggacgaaggttattcagacgaaagcgccgtcttggctcttgcggagaggcaatcgttcgatcagcaggaggcgcaccgtgttgcacgtctcatgccctctagggaacgattcacgcaatcacctaatgcagacatgatgtcagtcgcatcgcgaacgccatcgcaggaggccatcgcagagaatgccgacgcattcgacgatgcggacgaagagggcgcccgcgagcgagcttcgacggtctatgcccctagcgacctcactggtctgggataccctgccgaggcgatcgtgtttggaaaccgtgccagccaagccctttctatcgaacagagatccgagtccatgcgattcgttccgcctccagtggaatcggtcatgtcaccccctctacctcaggtcggaaacctcgcccacactatgtcgccgccgacagacggtcgtcggcccatctcgacgggcagcgcaatgacggacgggcgttatatcgcgcaaaccaacgagacattcaacttgcaccctcacatcaatccgccgcctcaagtgtccctttcagcagcgacttggtcggctcccgcgccttcgacatacaggatcgaaagcgccaacggtagccccttgccatcatggctgcactgggacggaaaggagctcgagctgtggggtattcctgcactaggagacgcgggtcaggtcttgcacgtcaaagtcgttgagcggatacctaaacccaagaggaagagctacgactcctctcagctcatcccgggtgaagcgaccgagagggaagttggatcttgcattatcgagtgagtcaggaaaaagaacgagattccgaccacgccatgatcatcatgctaacgcttctgcacgctgttttagagttacggataacctgagaagccctgatgccttttctctggaaggattctccaccgcagtggcatgatgtgataagggagcggacaattagcataggaatcgcatggaagagatagatgtacactcggactgtaacagtagcatatttatattgacatcacacatcgactcgcttgaacgcttgtggcatgtcaagcaagcggcaggcaccgtcgcacacccatatgtcttcgtggtggtgctaagcgagcgaatttcatcgggtcatcctgaaattctagagaatgcgtgggactgagattcatcgcctccttccagttgttctggccgagtatcgtgacgacttcaaaaactgttgtcctctgactgatagatcgtcgacatgacttgatcctgctgcgaattagtctatcgctgcttatcggagagccccgtgatgcttttggtcaaggtgtgcgacttgcaacggtcaggattggcaaactcggtgtaccattgatatgtctcctccttgagctcgttgacggattctcgggtaacctccctaaacttgttcaccaccggctgccgagtctcctggacatgttcagccagcgcttctccccatgacgcgctggtatggctgcatgcgattcccgcacatctctggtcgaccagccgggctgctgtgccgagccttcgatcaacacacaacaagacaaggtataaaatgccatcatagacgaaaccaggatctaaatttgaacaaagccggtgtcgtacaaaaacatgagcgtgggagtgcagtcgggtgggtacaaacgaagcggaatagccgggatcttgatcttcatctagaacaatgggatatagtcgttgatacggtccttggcgtcttgcatgctgcgagagggtcgcaatgacgtgggtcagcatgggcggaagtgcagacgagaaagaccggacgattggcttacatgcactctgctatccacgtcaagtttcggacctcctgtttcgagccataccaacgatattgagtcagatgataccgggcaacagccggctttcactccactgacctgctccttgagtttgacaaagctgtaaaacacggcgagtccaaactgctgcaagaacgcgtccctgttgatgtgcacctcgcgcttgaaaaactcgtcctccaaactggctccgtccgagtcctcgccggctgctccaccgttgagaccacccccgctcgacccggtcgatttggaagcattgtcgaaaaaggccttgtactctggaatgtattcgacgcaggccttgacggtatcgacgtcttcggctcgagcgagggcgttgttgccttctgggtagagacgaccgatggtggggaacaacttggcccgttgttccttgctcaattcggtaccgaaactgttcaaggtgactattcacgtgcgacaacgaacagatcgtcagccttgacgccttgttaatcgtctcgcaaaccctcgcacgcactgttgatggttcgtcgatcggcctcgaaggcgaggaccttggacatgttctcccgcgtaggctctccgagcgtctgcacgaactggtaaaagtcttcgagatacgacttgtacagggtgtttcggatgatttcaatgttgagatcgtccaagtcctgcgcagagaggcaatcccggaagtagggcgctgttcgtggggcgggaggcaacgaacgccgtcaggatcaggatccagatctcgctaatcgcagtagtcgacataccaagtggggtgtcgaccaagacactgttataaagctcctcgacgttggtcgccacacaaagggcgggcatggtatcgaacactcccaaagggtgacacctctccaacaactcgtgcgtgtctcgctcgtgcaacgttcccagggtcaaaaggatgacgttgtcgatcatgtacgagtagctaaagtgatgtgggaaatgtaagcgaaagaaggggtcgaggacggagcagccgacacgaacgtgatgtagtccatgaacgtcgaaaggggcgcaacggcgttggtccggatgtagttgaattctgctacgagcttttgcgtagcctgggtaaagcgcaggcggttcaagcagccgaatcagaatccgaggacgcaatgagtgtatacaaagacagtgaccgaccttttcagcgatgacggcggtggagaggggcaaaggctcgttggccaaaaaattgccataatcggtagccgagagctggagcctaaagtctatcgagggtcaagcaggccataaagatcgtttcagcttcctcgtcctgctgatccgggtgccttcctgcacagatagaacgaggctgaccttccagattctcgcattgggtcaagttgttgtacacgttttgggtcaagagagaattgcggtaaccccggacgacaccctccaggaatccgttcgatgcctgcagcacgaattggtgatccaaatggtgatgtcagcagctttctacaatccgcatgagccgaacagagacggacgttgaagaatagcgcctccatgataatctgatcggtatgtttgggctagatgttggttttttggacgtgcgtgcgcctatgttccgcggcaatctctggtgatacgtcaatccgtcgggtttgttttaacgtctactttgaatcgcttgatcacttgctacttgatggttcgaatgtgaggggatcaaggtgaatgcctgtacaagactttgatggcattcatcgtcgacgttgtaccaccgatggcgagcccaggcgaggttgatgacgaccggaacctcgtgagagaatgtatcggttgcaccgcggatagatagatacctcactctcgcttagcttgaacctagcgagccgtgtcgtggccagctagctactggctcgaagcgagagaaattccttgctctaccctgcttgcatttaaaaaacacttgcattcatgccctccctcttgtcagcactgtgatcacctcttgtcccacccgtatcgactcgttcttcatcatggcaggcctctcagacgatactctgcacaaggtccgcccatgttcagctacattgcttgctacggccaggacgcatggctgatcgggaccccttgcagagcagatcctgcagcaaatccagcaacaggtgagagcccactgcgtgtctactcgagacggtctgcaatagctaaccactcaatgttctttctccctcgcgtttaccaggctgtggtctcgcaacgaagcctaaaccaagtcaatggtcagatctcggccaaatcgcgagaaaagaggatcctcgaattgaccacacgtcagctcgatgcgatccccgccggcgacgatgtcaagatgtacaagggtgtcggtaaggcgtgagtctaggtgaaatggatccggttccatctccggtcgacgctgataacaaattcgtccgtagattcctgatggaatcgcgttcggacatcaaggcgcagcaatccgaggaggacaaggctttgacggaggacctcacaaacttgtccaaaaaggtgggtccagctcttgtcatgagtgtgtacaacaagctgaacagtctttcgtgactaaggccaaattcttgcagaagcaagtcgatgacgcgcaaggtcaactgaaagacatcgcaagtccccccctccccacatgcagattatacggaaattcggcgactaacactgatccgggtctggctcatggcgacgctcagttccatagccagaatagggaacgtgattcttgatcaacaagatcgcgttcttcccggcttttctccttatcccttttccgtatagatgattataggttgtaaacgactaattccagccgactggagcatctcaacaacaccgcaataatgacggcatgccatcaatgaaccgaatacctggaatgtcctgcatcggttgacgaccccgtcccaggacttgtgcccgtccgctactctcatcgcttcttgatcgccctcgatcgctcacctatactctcaccccagcccttctaggacgcccggctcgctcaaaccccctaccgagccgggatcgatcccgaaaacccccaccgttctcggatcttctttttcggaagagattcgagagtggacgggtggaacgcaagtcgaggcgagaacgatatttcgtcttatctgattacggtagcctgctcttacaccatgtaacctgtgcgggatacaagccgattgtaccataagaacagctcttcctcctctccccgttcgtctatttttatgaaccaaaccatatatcatgattcccaccgctcgatttcgtaagccccttgcaaatcgttattcaatgtgaaaacaggtgccgctctgcaagacgccagtttgctgacatcaagggagtcacgagcttccctgtcctcgcgtcgtcttcagatgattaggtgatacccaaggacgcatcttggttgtcactcattactcaagcatgaagagcatgcggaactggtggacagaccaagcttcgagacctgcctgacgtggatcgtcagcaacgatagtcgactcgaccgccggtgattttatcaagacttcgcgcttcgtcctgatgtccaatcaaagtccgctctgatggctggcacggccacagcggggcatctcgagcaaagcagcacaaatgccagctcgcaacgcgtcaaccaggccaagaccagctaatgttagcatcgagaagctgcgcgatgttatcaaatatctcgtcacatgacaatcggttgtcgcatccacgtgtcctggtaggggattctaatgatggtataggctttgtagaagaatctgataatggtatctttgaggggtatatgctacatatgggcatggtctataccgtgtagcttgagtatcgctgacccgtgctgatgagttcggagcgttcgccgagcgtgatgagataggcatagataagttattcagctgagatcgcaatcacattcgcgagctgaacgagtggttcgcaacgatacacgctccgcctcagacttgatcatgttttcttgttccccacgtgaaacgctcccccttttgttttgttctttaggggatgttccatcgagctccgaccttgtaagggaaggagctaggctgacgggatcttccttgttctgatcattggcggaggctcgtcgggatgtagggaataggtaggaaaggggcactcgagtcaaacgcggggaagtactcacagagtgttcgtacgaatgagcgcgaatcgcctgtacaggtattgccaattcaacccttttgcgactacgccgcttaccggcgcttggctagtcgcctgggtaacgtgctttggtgcgtgctgtcacgttcttcgaccggcgccacctggatctgcttcaatcgcctgggtacgacaaacggcaatttccccttcttttcgagctgcaagagaatcccattttgcacaagagtgtagacggtagacgtcgcccaatagattgcgacggcctgtgcgatagtaaaaaatgtatgcaatgttaattaggcattctgatcgagccggatcttcatcatctccgactcaccgccggcgcttccgcagcaaaaccgacgctcgctacggcgagacctctgagggcgaacccgatgatccggctcgacaagctgacgacctcttccctcttttccacttcggcgccgaccgctccatctcctacagcaggtgcatcttctagtacggtccgcctgggcttcaacgtttgtcttcggggatcaggcacgatcttgcccgtctttcctcgttcttcacccgagcgcgggtcggctttggcgctctctgccaagccccgtgacgagtccctccaagtctgcatgagttcgacgttgctgaacgcggcgatcccgacgatgaagggtaagatcaaggacgagtccgggtcgatgagcgaggacaggtgaaacgggtgttcctgcaggaacgtagccaggtgggtggtcatctccggcgtgttcgccaggatggaggcggcgttgtctaacccagtctcggagatctggggatcgacttgttgagccatcgcccgtgcgtcgacatcgccggactgacccgcagcgatggatatggtattgagctcggtggccagtcgggtagcctcccggatggtcagcgataatcccaagaagatcggcaggtggaccaagggaggtagaaacgccatcaacctcggccggacaccgtactccttcaacgtctcttttctggcctttttgatctccccctgaagaacctgtacgtattccttgtgggacagcccgagtttcctacattcggggaccaggcttagggcgaggttggtgttcttgcgcttgaggataggagcgacgatctttcgcaatcgaaccatgtgtgctcttgaccatacggtgatcggcagagtgatgagggtacgcgtgagcagtgttaggaggatgatgctgcccgtgtaggtcggtaggggatgggagaggaacagggttgacaatggcgtaaagacgtcgaaagacgggagcgtcatggccgggaaagccaaagccatgcttggcgagatctttgaaagaggactgccgtcggtgctgatggtcgatcgttttgtattgcgacgtgcttgtcgaacaactcgcgatggccatctagaggtagatggtgaacctccctgcctcgcagcgaaccgcaacgatcttgacggcgtcccgaaagagatcctactattcatggcatttgaatgtttctatgaatcgagtggcgtgtgatatgattcctcttttcggtgaatctgcacctgatgcgatcgatttcaaaaagtcatgattccttcaaagttcttcagcaagcgagcgttgagaagtggtggtggtggtagtaaagggttgcttgcctttttgtgtgttttctcgaatcgaatattcattttatcattcatcacccatcatacatcatacatgcatccatgggttagtgccaatctgtgtctactcgctactcgtttgtatccggccaggacctcctcccccctcactgatcagcgggatgtgacgatacgataatcatcaggatcctctcgcctacttgacaattcgccgatacactattagacatctagtcacacttgtagaatcagatctcaaaagcggggtaaacggcttgcgactcggcttgtgatcctatctctggctttccagaatcaagtggatctcgtcgacatctaccgaaacgagacctagtcagaaacgccgtcatctcatctccctgttcgggtgtcaggcctcgcacctttccaaccaaatcaatcgcaactttccgacgcgcgacctctttcttaatatgaagcatactttccggatctgggtctcatcgaccgccgtgctggtggccgtcatcttggccctcgctctcggagccgatgcctcaccggccaacaccggactcgtccgcgctcagattgacgccagccagtcgaccttttccgtcggacatgatgacgaactggaggtcttggcagtcggggccgagaatgagatcggtgattatgctggatatcaagtctggcgaatcaatcttctcggaggagatcgggctctggcgcaaggagtcgatacggccaaagccgccaagcacgtcatggaagtagcacaggtaagcacgcatcgagatgggcgctggggtggacggagagtttgatcgagacttcccacacctcacagcttctcgatctggatgtctggcacacatctcgttcccatatcgatatcctcctttctcccgagatcaagtcgcacttcttctccctaatcccacacgacctccacccgggctcgccgctggtcgactcggacctgcttcagacgctcctcagccggcccggtcgtaaacaccgcaaacgacctcccccctccggtaagtaggggtcgaggggaaagagcgagggagatagggtcggatgaggactcacttcaacaaagttggactggtacttttgatcgcgaggcgcgaccagccggtgaacctctcctcttagtcggacctgtgtcaggagcagagattctcacgaacgagtcagcaggtgatcgaatgcaaggaaagcctgacgaggcctgatcggcgctctcaccttttcatcgtcgtcgtacggagcataccattttgacaacctcgtcttgccctgtcggttctgtaatcatcgtggtgcgcgtagcggtacaggtcaacacccgggccgctcgtcgatcgggcgtgtaaacagacttgcctggacgaggatgaacttgatcatgacgagagcggtgttttcatgcgatcaaggtcgggtcgggtcgggtggtcgtcgatgttgagacccggtcgaatgatcggggaggtccgaaatgacctgctcgacgacatggtgccgatgatgagagggttctctgagtgacatccatcgccttaaacgccagagcaagagttaaggagaggtcaaggtgtgatttgatttgatgacgtaatcaacaaacattcgacttctctcgtcatcaaacgcgcgcgatacgcgacgacgcgtttgtccaaagattgtctaaagtgcaagtggtgcatatcaggccatgcaggccatttcgtcaaccccgcaatcgcaacgatcagaccagattgagatgtgttcaacaggttgagctcgccttgttttgtgcacaagactatggattcaaatgaacccgagtctgctcgactcgatagggagatcgccgccctcttgcaaaaaaaggcggcggcacaggcaaaagaggaacgacgagccgaggtcgagaacgctagacgagccaacatcttggtcgagaacagtcccgtcaagaacaagacccgtaggtgcagatgcctatgagctttcgaaaatcttacgaacaggtggatcgtcgacggtgatttgctgaccgctgcccacctccaactcctcgtagctgccccacatcatgcggctgttcatgaaaagccaacgatcagacaacccgtgtttacggcgaaccgtctgacaacgacccatccccaagccggaccttccagacccgattcacgatcatcgccctcggtctctacccctacctcgtctgtaccatcccggttatcatcggcgctcctccgagctcgccagaacgatgcttcaggagacaccgatgacctcgacggggacggtacggtaaagccggggaagcgacgggatgacatggacatgaccgtcatcgagagcttgacgctcggtcccaaggactatggactggatacgatggggaccgaggaatggaggtggacagagccgaatagcgggatcaacctcaagcgagtacagtacacacgacagacgtcctatccgggcgagatggggccgtttcgctaaccacgaaatctttatgtctaccgtctttcgactcgcagagaaagattgatgtcccacagtcaggtccagaatcaactcgccgatcgatacgtgctctctccttcccagatctactcgatcatgcgtctctcgaccgacaagcagcattacaccatccccgtagatgccggatgggcggtcatcggcgtggtctgtcacaagggggagatcaagatgacccagggcaagcggaaagaggataccggcaacaaggggaaaggtagagcgagcgacgaagacttggatgtagatgacgacgaccgagcggcgggagatcttaaacgtcagaagaacggaccgggcgctggtgaatggacgaacaagaacgcaaccagcaagagcgcgccggcctccaagttcatcaccatcaagatctgttccctgccctcgcgctcgcaactctcagggaccgccgcagcttcacagggggatgccatcatgaacgtcatgctctttgaatccgactcggacgagacgttgccctcgaccgtccccggagaaacgggacagaaacgataccgcggtgggagtggaggcgctttcgaggtctggtggaaattggccgtcggagccgtagtggggatcatcagccccaagatcctcaaaccgttcggggtgagtcggattcgtctcgacgtcatccgctcgactggcttaggccgggcctacaccgccacgttctgatgcatgtgtgccccgacttggcagggtgggaacaagggtccgcatccgctcacgcatcccgtaggcctgacaccttcgtcggcggatgatattttcctcatcggtcgagccaaggatttgggaacatgtgcgtccatcaagagggatggcaagcagtgcacagaatgggtcgatctgtgagtcggaacgatcaatgttcgtcaagagattcgattctcacgggacccattggggaaagggcagacgggtgcatcagcattgcgagtaccacgtggttggggcgatcaagcagatcaggggcggcagagcagagtttgcgggaaggtaagtcgaaccgtctcaagtgccacaagttgattattcccggctgacttggctaaacccccgaccgggaagcacgggcgggtttcaactagcaatgaaggcggctgctccgatgtacagccgaggcaagattggcaaagataatggcaaggaatggaagacccggccgacgaatcagatcttgccgaaacggggcttcgacgatgggaccggacagacatacatcgtcgggggtcgggccgtctcggaacgcaagtcacaaaagtttgccgacgagcacgtggcagagcggatgggccgggaaaagcagacgaaccttcgacggaagaacgaggctgccgctcgagagaaagagcttgccaatttgatgggttcagataatgggaccacgggtgccaagtacctcgaggcggccaacaagcttcgacgggaagatgaacagaaggacaagaaggaaacggccaaaaaagcgctggaacaggggttgggggacacgttgaaacctcggccgtttcacgcgagcgcgatcaagttgatagggttcgatcccacaacagcgcagaatgagggaggattgatggtcgagaagggggaggaggggagacgacgtgtgagtcccgatagagcggggccgaaccgtcgatccgcgtcatctgatacatgcgaagtcgctcctgccagctcgaagccatcgcttctctacgtagcaaggctcgacctgccgctcgactcggcaacatggcagggagcaagtccaagtcgaatgctagcgtcccgctcggtcgacgtccgcagccgccgaagcccaccgaccaacccattgaggagcccatgatcgatctaacggactcggatggcgattgagctgggagaaacacattcatgtcattaattgcaggccggtcatgactcgttaagctcgtgaggatacacatataccaatcgtcgatcgtgcttgctccaagccagtccctaactgaaagacttcagagaaatctgtggcttggacgtggaaggggctctcgaggttgcagtttggttgctggccacgctctgtcggatggacgtctctaggcgttcccgctcttgaggctcgagagtattggcggtatctttgaaggccgcgggagcttgtcctgcaagcgccaagaggtgccgcacggccaaattgtgtatgggattggattgctccggtgtcaagagcatgatgagactgggaatgaggatcatgtagactcgaggttctatcgcatgcagacaagttagccggttgcgatcacggctgggccgtgagtaattccggattactcactcgaatcttcgtcgaacgatgcgacgaatgaagttagaaccttgatcacttcgtcggtggtggcaatgaccggatcgtccggcttgatcgactcggccgtttcggccgttgtggctaggaaagaaacgagctctggaatgagttgggagactccgagttgcagcgccgtattgcctcgattggctgattgcaacagagcccgagcacattgcattgcgacaaggccgacctggtcgaacaaaggcagtcaggatcatgcatgtctcaagacaagaggcagaatcgacttgcctgtcctccagccttggcgcgctgcccgatggtatagcaagcctgctctacaatgtcttgactgaccctgaccgaggcgccaaggttggtgagaacgaggaccatgagcaacatgttattcttcgatttgacggcggccgcgaggccttcacgacctctgcatgtaccacatccgagatcagcacgaacttaagcggacggctgccgagtgtaactcgcctgacgtcatccagattcgatagagccgcagaaaggatgccgtgaatggccttgcccaaagtttcctggtcgggactatacatgtagccagcatcgagaagagacttgaaagctggtaaagtcgggcctgcaacatcttgctcgttgctctcatctctgagcagatctactcccgcacatgctgaatgagcaaggtcaaagtgacatgtgattcgctcaagacttaccagtgtacagctgtataccaacgaggaaagcatggaaacgagtccccgcatccaaggcaccgatggccgaagtgaaagactggaatccaatcgacagcgcctgtgtcctatccgcaacgctgtcggatagtaagactgtcatcatacaggaacaagagaaatttcaagggcgatgagcagcccttctctacaaactccgacgcatgagggcttacagttgctttgggcgtccgcagtaccgatgctgactcgcagagcgtatgcaatgactgcgaccactctccttatatggtcttggtcaccagcaggaccccgactggacgcgaagttgctcataacttgaaccatctccgttcgtagggtggctccctctcctatggcaacacgatagcacagtgtgcacaattcgtcgaagatagagctcgaaaacagggctgctccagagtaaatcggtttgacgagcgtctgcaatgctttagtcgcggcaatggactcttgcctggccgcagggttgccgaaagatcgcgagatcgtctcgaaagccagcccatagaccacaaagaagtttggcaaaggcccagggcgaatagtggcagtcggaatggttgtcccttgctcttgagattggtcgtacccaaatgcctccagaatcgaaccatcgttgactttcatagcgagggcgagagcttcaaggatcacagtagcggacttcttgtagtactgtccacacggaatcgcgggaaaaggcgcagacggagcaaagcagcttcagcattggcacaagtttgtgggattaaatgcatttactggtaatagggtttctcgccccaaacccgattgagcgagatccattccaccggacgacaaaccagatccactttccggatcaacccttagcaaagcgtagtccttgagggttcccacccatagaagattcaacatagcttggtgcggcttgacgacgtctttcaagaaagtttgagtctcgctcgaaaccctgagctgagcccaggcggtcagtgcggctaatttgagagtaacggccgcgttggatgacagattttcaacctcgccgagcggctcagttgtcccttctgaagagagcgatgacgaggcttaagcgagcagaatcgatctgaaacgggaacccagcttccttaccactgcatcgcataagagcgcccgtcaagagtttgaggatccgacccatgcgggaaacttcgcgcactacgcctgagccaatgaagacagcgcacacatctatcgcactcgctaagacttcgggagcggagtccgtcccaaaactcggcgtaagggccgcagcgatcggcgcttggtgctgttcgagcagcaaggcttgtgggaagtcggggtccgggctttgagcaaaattctgagctcaagcgtgtcagaaatcttggtgatgaccgacatgacgaatacatgaaactcacaatgacgacatcctgtaagacctgaagcccttgcagacggacttccgaagtgcttgcggttgacgcagcgaacgccatcttgatcaagtcggatagttgggccaccaatagcaagtcgacgggtaagccggattgtctagcaatcactatgtcaaagtgttctcgcctgccggaagcgactaccgccatgacgacggcatgtacgcattctagcgcgaacagctgtgttcgccatctagctggagcagccgcttcaagtgcggaagttcccgagccaagcgattgaccttcatcatcttggaatccggtgagtactgacttggaattgtcctgcttcggggcagtggtgctcttgttgatgattcgctgacagagcgcgatccaacctgcaggcatggttgctgaagtttgctggatccacgagagaatgatctgccgcacaccgtcgattgatgggtcttcgtcgagcagtccgaagaggacttctaccaagcgattaccacccaattttgacatgagtgcagcgtctctctggaccacctgataaagagcggtaatggttgcgatgcgcaacggtccatgaccggcctcgaggtgcgcctggaaggtcgtcactagctcagccgtatccacgacgttcggcgcaaacatcaagagctgctgtgtgcaccgaatggcttcgaccgcaagaccgtcttgacggtcttgaccaaactctttgaccagcatcaagctagtttcctgcgttaacgtcgcttcctgcatttcgggaccgatgacgccgatcaaggtatgcaacagtcggcataatgcaggataagcaggcaattcccctcgcatgttggcgcttccgactgatcctccgtctggctcgtgggtctcggccatatatgagcttgcgatcatgtccatggtctgatctacgaaaggcgagtatgcgagactggcaaagtcgacaattcggcctaacgcgcgcagagaccagaagtggacgatcgggtggggatcggtcgacaatgacgacagcacattaaccaaggtcttcagtaaagagcctgcagatagacccccaatcctctcgtagacgcaagataaggctagtgcacatccagctcgactttcaggtactcggttctgtaccaactgatcgacgagccattgcgtctggttgttgacataagatccgccggcaatgccgatgagactgccgaatgcagaccccgcagcccctcgaatgggttcctcgcggtcaacgacagcgtcctggagcagtgcccggaggttgacgagaactccagtgtccgacatgttgtctctagctttccttgtcgcaatgcgttcgccgtgtgccaaggcgcatttgagcgacatgatgatgttgtaaaggaccgcttgtttcctgcccgggttccggtcgagcttggggctccttaagtgattcgtcatcagagtcgtcgcctgcatcaatgtgtctgcactttgatgtatgagaaggacctcgaaaagcgctagcgccgcatcgactacaccagtcgcggcaggaaccgctgtcgacgatgcattgacttcgccagaggttcgattgaggacgtttagacggtcgttctcgagcgttgccaagaccggtctcctcagctagatgaaagaggcaagccaatgcgtcaatggactaatctcatcaccctgaaacaatctgaatctcaccatatcttccaaatactgttcgacaagatctcgatttagggtttcccctcgggatgatgcttctcgctgtccggccgtggcatcggccgagcatacaccatacccaaaaccgtctgaagtggcccagacgtccgtgaatggcgcgtttgatgcgtgagctggcgtctgtggatgagcaccaggcagtccgctgacatcggggtccgctagaattccaaccgcagcctgtaccagtgccggctggacgccctctgttgcgctcgagttgcccagcgcgccgaagcactgcagaacccgtcgtcgcagctcgtgttcccgcgtagcgagcgtcatggccgctcgagtggctccaacaggtacgtttgggttctgctgttgttctctgaggtaatcgctataggccgtggcgaacccattgacaaagttcagcgtgttcgtgagcaacgaggtgagccgcctcgcgacgtccagggtcgtcaattccttgttgttctgcaggaatatcaagatggccgacagtgtatgttcgcggacgtccaaaaggaaagcccactccttctcgcctcgttctcctaccgatgtgtctttactggtaggttttggcagcgagttcctccataagacgagcaattgaggtagatgcgaagcgacaaaggtgggtccgagggtcatcagaccgctcatcagcgtccaagcgacatggacttcgacctcggcaaccttgaaatcgtgctcgcccgaccttttgagcagttgtacagccgtgtcaaggaccctggtgctgatgtcgtgtgatacgtacagcggtcggtcgggaatgaccgccatgagcgccccgatggccgtcgccttgccgtttgcccgtgcggagaggtcggatggcgctgaggggttccccatcagtccgatatctttgtcgagcgcttcgactagggcgttcaagaccttgggtagacgcaagggtgtggtcgagcaatagactcggaggcatcgggacgaatgcagccggacggattcacgtgggtgtgacaacaatctgagcaagggttcctgaacggcgtcctggatgacgggagctgcagttcctaattgcctcaggagctctgccatttctctcaggatgaccaagaggaccatctcgctcggttccgttgcgcccgggaggagggccggccatttcttgaggtacttgtcggcgatctccctcacggccatgccctgtccttgttccgagagcgatcgcacgccaatgacttcccgtaacatcaaaccgaccatctcgccgacgcaagcggcttcatgtggggtcgtcttgttcctgggctgatcgacgatttcgacgacaaagtgctccaagatctcggcatagcgcgcttctacataccccgagcctagacgttcaagcaaggtcgcgtagatgtcaaagatggcattcctggctctcctcgcaggtgccggtaagcgattgaaatgggtcgagaggatcttgaacattgcttgaggggtgaggagagatttggtcacctcggccgcggcagaagtgacgatcgtgattggatcctcgtgatcatccccagcaggtccagtctttttgctcttcttgtctggcggtggagcgacgaccgatgcggcgtcctgcgtgaaagcgagcagatgggcgacgagcttggacatggccctcctggtcggatgatccgtcttatccagaaccttgacgacgagggtgacgatattctcgatctcgtacatggtagtgatgacgctcgtgcagccctgtagtcctgcaagcgccccggcacatgtccgttggaccgcaagagcggtgtcactgagcccattcttgaggtatcgtagcaggtccttggcgatctggtcaggaacagctcgcccagccgaagagagcgatttcgtcaaggccgatatcgcttgcgctcggagcagaaccggctgtaaggacgtgtccttcagcaatgcttcgaatctattggaacagtcgtcatgatctcacctgagacgtcgcccgaacgatctttactacggtgaccgcaatctcggacatcaacgacatcatctgcaagttccgccgccagagatctgatgagtacccaaccaaatgaaattgaggccgccacatgacccgactcacattcgcaccgtgagccttcatgagttccccgatgacataccagcacgcgctgccagtccccagatcagcaagtcgattatgaattaccatccccacgatgagtctaaggacttacaccctgtgcgtgctatctgcaccgcccttcataacgtttccattgttctccactacgacctttaacaagtcctgcacgaagtcgaagagcgtgcgggattctatccgtcgatgtagcttgacgatcgaccgggcgatgatctgacgtgccggccgaccggggttaggtaaggaagaagaagtttgaggcgagtagacgagaagtttcgtaaatgtgccatggagcgagtctgccgaggattgaagatcggcctagagagcgagcgtgcgaaatgcatgtgtttgtgcttgtcagagaggaaaagacaagcgagcaaacggccgagagatgtttacctctggtagagcatcgatcgttcgttcgacatctttcaaccagagcaagagcttgccctccgatcctggagctttgaatcggttctgtagcaggtcgggttcaaggtgagtctcaagcagtggccgtatggaaacctagtcgaggcatgccatacctcatcgaagttgaagttggctgtcgatagcgaaccgtccgctccctcagacatattgggaaagggggttcttttgatcgagatggttctgtgcggtctttcacagtgctggtaaggtctacaacgatctggtcagtaaagcaagagatgatttcgatgtaggacaagggtcatgcgagatgctgggtgctcgtcggccctcgagcctgtcggacgtatttacggcatcggatcccagcgtacggcatatttatctgccggcatgaccacaatccgtgagctttttctacttttccatattcacgcgtcgatcgaaaagggtaattttcgagagcccgagcgtataaattacaacgtctcgatcgacgacacaatagactaggtaattttgagcggacccgagcaagtgagcgctgagagtaggccgatacggacgagttgtcattggagcgaggcgcttttgcttggatgaaagagccgggcgctctgaggaattccggtattttcgctagaaatcgtgtcatccgacttcagcggtcctttgaccgtttcgcgtgtctgtgaggagcaaataccctcaaatcgaccagattttcccatttttgaccacttttaacgaggaaaacgcacaacccaataacacgaaacaaccctttccgtaccacaaaggccgaacctctcatctcaccagctcgacacgccttagataccatcttcaacgaccctctgcagtcatacatcgtccttgcgctcattcgagatggatccaacctggagtcatcagagacagacgcaccgccaaggtgacacttcggcccgatccaatcaatcctttgcgacgtcgaataatggcaatcacgggaccatcaacccggattatcgtcaggcgcagtcctacaacccttcttccagcgggacgtccgcagcaaatcgtcctcctgggcagattcatgatgcgtatcgaagagcagagaccaataacgcgaccgctgcgagagacgtgtgattcggcgggcgtcgtgatcgaggtcgagctggagctgacgggttcatgatcggttaccccttagatattcggcacgttccgatcagggagctactcttactgccgcctcccaaacccctgtagagacacagaccacgacaaccaacaactcggctcgaccggcccctaagcgatctcgagccaagaaacaggccgctcccgtccctgatgccgccgggacggcagcgcagaccagcagtgcggcaacggggatgaccgaatcggctcaacccggtcgacccttaccttttgacaccaaacccctctacaaccggatcgaacaactcaccaagacccacggtgatctcatctcttacctccacggtgaactcgaccgtcggcgtgattgggaggagatgatggtcaaggagatgcatcagcgacatcaggtcctcttgacgctcatcacctcgctcgtacctgtcaccaatgcgaacatgggatcggctgccgctgcgagcagatcattgctggctccggacctgagcacgaccattggacgagctgggttactcggtatgcctagcgtttccaacatgggatctctgcaagacaacgacttcggagcaggcggagggttcgatgatgataacgactatggaaacgagtcggctgtgatcaacccctctcagtcgagccattacattcaccagaccggcaacgagaccgcaacggggcctgcaggcctcaaacgcgctcatgacggggacggaccgcacttttccgatgttcacaaggacgctggagtcgaggtggacgaacgcgggatcatctacatggcaggtgggaggagggcggggatcgtacccacgaagattgctgtgagcttgaactcgtacatcatggtcgctcagcgaatgaagctcatcagatcccgccgacctcagtcattggtcagaaagacattgtacgcatcgcaaggtgtcccggtaggcagactgcagttgccactgcacgtcgccggcatgtacccggccaatggcgacgagcattggtcgtttgggaacttgcgattcgactggagtgagtcgtcaggagttatcttcagatcccgcgggatgatctcgatgctgatagcccggggacaatgcgttcagactcgacgaccaggaaatcctctcataatgctgatatgaagcagattgtgatcgagcacattgttttacatcgatacgcctacccggagatcccagaatcggaattcacggccgagcgcttggatacgacatacgagcagtcgtttagcagctggaaagccaagtttttaggcaaaaggccgagcggacccaacaagaagccgaggaaatcgatgggcctgagagaggttcagaaattgctcgaggtcgtggggacgggaaggcatgaggcggagcataatgaatcacagacgccttccgtcggtggggatggcgatagaatggtagagtgatcccgatggcttagggattccttggccctgacaggtagtgcatcgcggcgagacatgtctgtctcgcgtctcgactagcttaaatcatcgcgccggttcatgtaccgaatgtctggcttcctccgatgtgaacagataacagatatcttgctcgacgccaaccttcgcatgttgcccttgccgtgaaacacacgcagcacatgatgttcgatatttcatttgacttccgcgctatggcgatcagcatgggtattaccgatgtgtcctcgacgacaatcgtcaaaaacttcatcgataatcttcgcggtccactggagtgtgagagaacctgagtgaaggagagggccaagacagttgttaatctgccccatgaagagtgcaaaacgaatcacttttgcgtttggtagtgtttgacggacacatctgtaccaacgaagtaatcgaagtgagatgattcgctatggcgagggacttgtaaaagcgacactgtgtaagagcgacttgcaccatgatcgtaaagattacgcatgtctactttccaacagtacagtctgaagtttgaaacttcgcatgcaaatgcgaatcatcggatgcatactgcaagtgattcccataatcatgatagaataatactattgccctgttcgcactacaatcttactgtcatcttggcctatccaaactatcacagtagcataatctgaagacattccttattcgacctcttgcgatacttagacaatattgcccagtcgtttgtacattggcacatagcggcgattccgcctacgaatcgccgtgagcggtcaccttcttgtgtttggcgagctcgatagatcgctttcgagcattcccttgtaagaaaagggaatcgatctcctccaacgtcattctgcgggtttccaccatggtgaaccacacaacgaagattccgatgaagtcgaagacggcgaagatgatgtacgtcttccaacccagtttgagcaaagcggtaggcaaagcgaagctgttcgaggcagtctaggtcagagtgaggctgaaagatggtgacactaagtgacaaactcacgtgttgatgcaggatactccgttggtaagcaatccttgcattgccagaccctttgctcggttttcgtagctgtatcatgaatggtgatcgacggtttagcaccggatccgggcaacaacatgacacggatctgactcacctgaaaacttcggccgggtaaagaccctgcaggggagtgacaccgatcgaaaagaagaccatgaagaggtagatcgaggcaataccggcactggctcgggcgttactctcggagccgactggagataggagtatggtaacaagggacagccatccgacacaactcatcaaggcgaacagcaggagctagtgtagggacagtcagtagctggaaaaaaattcgacttcagcgccaacgccaaagcttacctttctgcgtccgaccttgtcgacaatgacggtaccgaaaccggcaccggccatactggtgacactgttgacgaaattcaaaacgcgctgtctgtccggggacgtgataccggccaatccaagcaaggtgggcaaaaagtaggtgatcttgcacagattggaagagtatgagtttactactgcgagaacgggatcatgttgagatcgagcgccactcacaagaccattcccggcaagctgtccatagatgctgagcaagaaggcgcagaaaagcctgtatcgattggcgctggtagacacaagcttggagaagtcccaccatcgctgtaaggttcgatgctcgatcagctgcactgtttttgacctgatcttgctacgtggaggcgaaccttgtcggatccagtaagggagattgcctcttcaatctcggcgatttgaatcttgaccataggcgaattaatgtcattatcccgcgaatggaatttggccaggatgcggagagcttgctctcgctttccacgggcatataaccatcgaggtgattcttcagcgaagatcataccgatggcattgatgatggcgggaagaccttgcacctgatacaagagtatcggatcagtgttctggacttgctgaagggaaacttgtcgggattgctcacgtagagaggagctctccaagaccaatcgttggtatatcgacctgtagggatagtgataccggaagcgagaatctgaccgacgtagtagaaggagttgagactgccgatcgtatcttcggtcagctatctatccaaagctacggaccgactgcaagacagacttacgttcccatataaagacctcggcgtttaggattggtgatctcagccatctagaagagcaagcctgtcagttggatcttcacagaaagtgggcactcgcaccgactcacataactcttggctgcggcagcggcagtggtacaacccaaaccggtcaggaatcgaccagccaagaacatgcccatgttcctggcgttggcagtgagaagagctccagcgctgcggtcaagcgcgatatcagtctcgcgattcttgtagcttgggcttcgctgcagtagcttacgtcaagacgatgttggcagagaccatggtccactttcggccgatcaggtcgggcaaggtcgacgaggggatgaaaccgaccacccctccgatggtgtacattccaaagacgataccggttctggccgccgcagtgtcgtttttgccgataccaaagtaggctttgtactggctcatcgagttgaccgaagacatcacggtcgcgtcaagtccgcctggcgtgattgatcaagatgtcagcgacttggttaatttcaggaaagcgagcgaagcaaaggagacgtactgtctgtaaatcgatgaagcgcaaggcgcaaggacaagtttagttagcgccggctccacccgagagagatccgcgaacgccagccccggctcacctccaccacacaggcatacacagaggacggtcaggatataaaagaggaatcgtcgatccgaataaggaacacctgggtcctcgcgttgtgcttgctcaagggcagcgtgcttctcctctgcggtcatgaagccatgaactcgggacccatcgagagagggcacatcgtgatccgagatgggcggggtcccgaccttgtcgtcggacaggtactcccggtgcgaataatcgaccttcttggaatccatgttgaatgtgcgagagatgggtgcgcccggtatatggggtggtactgcttgaccgttgcgagtgaatagatttccacgagaatagcaagacgaatggagccaaatatgccaggcgttatatagaggaaactgcccgaggtcatcgattcgcgtctccaggcgttgacctggagatcggcgttgggccccggaacgttaccccgacatcgatgtgggggctgagcgtcgagccaagacattctcttcctcggagttcctcagcactattcctgcagtcccttcgcccggtcttcctgcccacactgctcctgcgtggcgtggccctgcgttcggacggaagcagctgatcaaaagtactaccccttgcagcgtgcgccgctgggcggcgactttgccgcccggcgaaataagtacacacgcaggcgcggaagcgcgaactgatggccacctggtattcacaaaagaagatccactcggcccgaacgaagcgactttgtcggacattcagcatgcggcgttgaacagcaagatcgagacatggccgtatcacaaactctatggcacaacattaatccatcctcggcgttgttcgctggtacaacatggcgcatcgtcccgggaatgaggaggcgacgtccttgatcaaaagaaaccccggccagatggcataccaaacggcggcctcatcatgcccattcccatgccgggcatcatccctccgccatacatgcctaatcccaggggcggaggccgcgtatacatcctggtgtatcggagttgttcgaggtaagccctagacattggtttccgagagattcgtagctcgcattcgctacctactggttccccatggccagataacctcccggtggaaatggcatccccttcgctgcctttgcggccgccttttcggcttccatcttgctcaacttctcctccctctccttgatcttttcgtagctaggcggatacgcgtacctgtgtcacgcgtcagtttccccgtgtcaacgccggtgttctcaatctgtcgatcgcaacgcatatcgcacgtttcactcacttggcgaaccgatcggccggaggtgtcatctccggggtagatcgatatacggagatgctctcatcatcacttcggcgatgatgaaaatggtgtcggtgatggtggtgatgatgactaccgtggtcgtgaccggtggggtgcgttgaccgggacgaatgaccgtgacgaggcgtgggcaccacggacgacgtgtcggtggtgtgatggtgatgatcgcggtgatgtctgtgccggtcttgagatcgccgacgatgtcgtccattgccatctttcctattcatcctatgatagtagtcttcgtgatcgtcaggatgatccttgtccttgtgctgattctctcccgtcgatgtcatcttggattcgtcatgacctgaatgtcttcgatgatgccccttatgactagaccggctggtgcgcgttcgatccggatgggcgtcgtcgagatagtcgtgctgggactgaagcacggtcggagggccaggtgcaggatttactatctgtggcaacggcgcgatgggcgcaggaggtgacagtaagaacgatctgtagtcgactacaacagccgcagccgaattagccgttacatcaccccgaatgattatatcatgtcgacttacttataggaatgggtctcaagtcggaaaacctcctaccagcaggatgagggtcgatgccagcgtcgggtccacgcatcatgaccctctctgtatataccggcaggctgttctgcagcaccggtcggacttcgatgcgggtcacccccggggcaggatgagaggctgtcactccaggcggagccgggtctgcacatcctttatccgaggcggacgagagcttcttcttcctacccttagctggagagccacgggactcacggatcacttcggtctcgtcagggagtaccgtaatgtgctctgtctgtccggtatgatgcacgaacgtgtgcatgtggggcgatccgcgtacgctcggtggagcgggcgtcttttcggttcttgaaaagacgggcgggccgaccccggcggggactgaactggcagatgacggagggtgagggaaacgatgcgtatgccgatgagaatagtgctggggatacgtcgaaatccctcggggcatctcgaccacctggatgatcggtcgtggagccgagacgacggtctgagcgaccgtctgaggggccatgtaatcgctcgcgacgaccgtcgcatccgtccttgctgtagcctcgacgaccacggtctcgccgggaaccacagaaccccctttcttcttctttttcttccctttgcctttgcccgcatcgacggccgtcggtggggtgaccacgactgtcggtgctcgaggtggagatttcgtgatcgacgctcgcgccgtaatgcctggcgcgaccaccacggactcggcttgcggtgcttcgacgatgacctcttgggccactgaagccggaccgatctccgctacagccgcatgaggaggactttccgctttggccatcgccatagcaggctgaccgagctgcataggaatcttgacggtcgcgtgtaggctccggcgatgatgacctccatgatgacccgagtgggaccggtgcgaaaggcggggaatctgaaatggcatctcacttgtggatgtcaaaccgagtgcgttttcgtgttgagagtgatgagagggagcgatcgaccgtgtttccaggtcgatgactgttgcagtgggaggctcgacccgagctgggacaacttccacgaccttctcttctgcaggtcccgctacgggatgagtctcgacgatgacagtagtcccgtctctcgttcctggagcgtgttcgctcctctcgtctaccacgatctctgcgtaggcgttcgatatcgtttcaggttcgatgacggtatgaacgctcgccgcacgagctggcaactgccgaacaataggcggtttgggtcgttccgagcgtacaaccgtaggagccttgccgctcgctggtacagtgacgtcaaccgtcactttgggttcctgttcgacgacgtgtacgacggtcggagccttgtgcgtgtgatgggaccggcccgaggtcgactgggcgggcttgcccgcctgcatcggcacctcgacgtgcatgaccgacatcttcgctggctgtgtctcgccagtcatgttgaaggccctttgtcaagaactacgagctcaatcaattactatcgaccgacgactagtaggaaaggatgatgatctggattggcaacgttggtcatgactatcaaacaccgggagagtaagggagacgtacgaaatcgcctgtcccgactacgagcacctctgggttccactacttgttgacgtatacttcctgaccatttcgcatgtccatactgcgagcttgcgagtccttagaggagtaagtgctatatgatggagtcgtcttgttcccagttgatagcagggcgtacggcgtcgcatggtgacggtgttgtgttctctagatctctaagttgatcgattatctagagtttcgaacagtgatccccgtgtttgtttcgggtcggatcaagagaggttgaaaggagaggggagaggaaaggcaggtagagcgggggacaacaaaaggcgggaactgtagttgatcgccagaatgaaggacgaagccgacgtctcaaaagaagtcgaacggcatccggacaatcccgtcaaagggactttttggaccttccaaagccgccggtccggatccttctaaaggttccctcgcttagcgcgcttacgacaggcggtcgaccgagttgttcgtagcagagttctgggttaaatggctcgggcttgcaactggtgccaatttcgcaactagactagcagtctttgaggctaaaccttccgtcttagcatttgctggggggaccaagtgtctggctgctccagcagagcctcgcactgctagcaacccggactttgctaataaatcgccccctcaaatccagtagtgctttgaagcgagaccaccgacgcaaatcagaaggaatatatcaagatttgatgggctacatttatacagctacgtgacatactgaatcgttaaaaagtcatcaagcgatccgaattctacgcgatacacccaggtcatagcaaaagagccatcaacgccaacgatcccgaagccataccgatggatcgccatgatgacgaagattgcatcgactggccagcgttgatgcttcccttgctgttgctccctagcacagcattgcctccggcttgaccgttccctgactgtatagcaccgacatccacggttgcggaaccgacgttgacgaccgacgtagcaaacgtcgccgtcgacgccgtgtcgtccgaggtcgaagaggtcaaggcatcatcggtgaggaagacaatggccatcgagggtgccctcatgggaatagcgcacgtttgggcagcggtgtcacacgggatggtgaccgtttcgcggtctccgtagagcctgccatcactggcaaacgaggtccgaagggtctggttggcccaaaagatctcgtacttttcagcaacggtcgaggcggtgaagtatctggtttcgtcgacaaggatgggtcaatgaacgtcgtcttgaatgcatagtcattcccaccaccgactcacctgacttgaacgctgtctttgggcaggggctgtccaccgaagttgatgttgacggtcaagtcatgagcacccgactcgtccgaaacaaagttgatcaaggcaagcctggtgggcacgccattctcgtagacggcgtaaccagggtggaactcgttgtatccatcggcccccaggtcgactatttgactctggttactcgatccaaagagctcggccatgatgatggtcgggtagtagaccgatccagttgtccattggtaacctgaagcggcaaggttgttgggaggaggcgtaaaagcgttgtagtagacgttctgagaagtccgatgagacgggacagtcagcaagggtcgggccaatcttaattcactgcatgcttacctgtccaccgatgtgttgcagggcagcggtaaacgactgagaggccatttgcatggcatagtcgatagtcctgcgagatgaatggaatcagtttcgatggttatgcccggtttatgccggcccgcgactcaccacagagcagctccgaaactatccgataatccggggaaaccaccacaactagcggtaccgaattccatcatcatgatatccttaccggccgccaagacggtcgcggtgccctgaatataaggagccaccaggctcaaggctgaattatgagtgaggtagttggcaaagacgtcttgcgggttgacgacctgtccatcaatcccacaattgttttcggggtaactagatcgaggcgttcaatcgattgagtatcaacctggacgatggccaggaacacatcgaacactcactgctgcacagcgaccatagccagagcgtccagattgtcttgcaagaatccagcgttcaagacatcgtccagcaagaatccttcgacctcgcagcagatcgagggcccaatcaagaagttctgggactgtttgagactggcggtatcgatgatgtcctgtttgatgctcatccactcgtcgttgaattgagtcgggccgtagtctcctgctcgcttttgatgacgcgagtacctgcgatatgattaaacttagaacctgtacatggaaagtgcctgaaactccgacttacagatcaggttcgttacccatttgcaaacccaacaacctctctcccaagatggcctgtgcagtctgagcgacctcgtgaatgttgtcaatcttgttctcgaccgctgactcgttgaacggaagtccaaagaaccagtctaccccgaccacagccgagatgtttgccatggcgtagaagaggtcgtccgagtaattgatggtcggtgtcgccgtctgtgatgatgcgagaagtctctcagtcaactgaaagtgcggagaaacatggcggatgcgcagtgccaagacttacgaccgcggcaccctcctccttgatcttttcgatcatcgacccgtcgtccgtcccttgagtgtaaagggtagaagactcttgcgtgttcccgccgatcctcaccaaggctccgtgtccggcccggtttcgaatgttggccatgtagttgaggaaaggaactttcagggtgttggcgtgagatccgactgcggaaaagtggaataaacgaggcgaataaagacgcgttcaaatgggcaccaaatcgtcagtttcggtatagcatcaagagatatccaaatcgaccactcactaatggaaggggcaacactcaattcgatactgaatccgaggaagcttcccttctgcttaacactaagctttcgattgctgtcggtcaatgcttgttcattagcggggatggcaaggtcgaacgaggtgaccggcacatcggggggcgtgggaggctgaagcgtgagaggatcgtatgccggctagtaacacatgtccaccagagttttagtgtgaagatgcgtagacttgtaggcagcatcgggactcacgagaccggcatagtcaaccgtctgtcccgctgctgctgcagagtccgtgggtgtggccggtacgcccgtatacacggtgacctgtgcgttggcctgatacgctgcaagtacagccagaggtactgttgagatgatagagtacttcatgtcgttgttgaattaaggtgtcacgaggatgcaacaatcgtcgagttgtatttgatttctgtctagcttgttgttcttgttcgtcacgtctggccaaggtgtagtttgattatacttcgaggggttcgaggtatacgtgtatctattaatgaggagccagacgaacaaaagttgtgtgtagacaaggctggcgatagtaacagtacagggatgacaggatagagaccagaagtatcgatgagatatggtgtcgatatgatagtgagatcgtggtatgatcacaaacaagagcaaaggcaaacgacgaggagaacgtagaactgcgtaggcgcgcgatcggttcggattgttccgaaaaatgctgggaacggcgccggcgaacgatcagcggcggtattctgcgtatattaaaagcaaaccgaggccgccgacagacatgcgttcaagtcgttgtcgagaacatagacctattgagctgctaatagaggttgtcctcgtcagccctggtcttgatcgctcagatcattccgtcaacgtcgcaaggtcgatcgaggctttcctgcttttacttcacggcggcgaggggcgactgagctcgacggatctccctctgccgtgtagcctgagagcaacagggcgcggttcaaaaatgatcatcacaacgcgtctgccgagcagcggtacctcgccctccactttcgccgtacccccctgggcctggcgccgtctcatggggcagtcgcgtgaccgcccacttccgcagctctactagtcatcatcgtcacgtacgcaacatcgccctcgcgcgaaatctctgtagaaggaattaaattccccgagaaggacgcgtgagccggctgaaacgccgaggttatcatttgacgtttggctcttttgactatggggcagaggcgaatgagatggtcatgcttagctatgaagcagggattgccgacctcagcagtttcattgtcgctgtcatacaagagaggaagaggtaagatcgcttgaaatttagtccagtcgaaaggtgtatgcccgacgctcgtagtcgagcgtttggtggcaaaccgacgacgactctacttccgattacaaaaggcacaaagcgacgagaacttgtcagcgaaaccttgtcttctgccagggctggtacaatacctcttcttggcatatcgaaccagcatgagcctattgctgggaaaagtgctgtcgcaattcgagtgattgccacaagagccctctattaaccccgttcccgattactcccattcgaaatcccctggcccattgatgtggccgacattacgctgctcgaccgtggatcaatacagttagctgaagacagaagcaatagctgtgatagtaatctcattgcagcctacccggcggtgtgtctaacagtccggttgcgctgtggacttttagtcgtgttattccaccgggcacgaggatgatcatgctgtctgccttaattatacgttgcttgcttagaagtctttttgacagattgcttgaggatatcgactgcgtcatatatgatcgcgcgcccgtctatttggaggtttcgcatgtcaactaatcctgtgtcgcacactgcctgggtaactctcgtctcttgggcctgtccgtgtccaatgctaagtatttgctttgtcccacggggatcaggctgacctatgcatcatctcgcagctatccgatgcatccgatgatattctatatctctatgcagctttgccctgatggctgacattcaagcaaggaggctgcgggatctcacgcgcgactaaatctactctcacgaaatcatagccatcaaagcgataatgtgcatgctgcttacccctacctcaaccaacaaaccgatcagacccaaactgtgccctctcatattccacttcgatcaacagcgctccacctgacagtctctcatttcagtacggtattccttttgtaaactcgcctggaagctgggcgcacgttctttcgacaacaccccaaaaaaacctacctttgagggatccgatgcctttcacttcgatgcagtgcgtcgaaaatcacctctggacgatcacgcatcacacattgttccctgaacacgtctgccccgcgggttagctaggacctattgggtcgacagatcattgaacaatactggtcagcaaggtgtcggagctttctgcgtgtacctccagtcttggagactagcctcacgttgttcgaaactaggctatgggcagagagagcatatctccttcggggatcccagatggcattttaaagacgcaagtactcacaacagacacatcgagcccgggctggagcacgtgcgcctgatcattgcctcgcactcgaccaagaaaagcagataccatgggctggaagaggtaaatccatatcgcagagacttacccaaggcgtcgagtaattgcgatcgtggacttgcacatttggccactgaattctatctaaggcgattagattcgcctcctgactctagtcgtcaggacagactttatgcttcaagcaacatcaacatcctacgagcagcctgccattccagtatttcgcgtttagcatattatattgacgcgatgtaggcgatctgattcgctcaatcggagaaacttcgacaaccttcgcgatttaacgggtcaatactaggaggagacgagaaaatgtacggtaacgagaactgagaagtgctgcaagtacgatagccaatctgcaccgatgaatgtctttcgttgtcattccgcatctaactctcgcctacaccctttgcggtcatttatagctcgtccttgacggcttgaacggcgtcgtctactttcttgcttgccttggaaacggcagcatggttttccgtcaatctgtgctcgatcttctcgaagacgtaatcgacggcgtgctcgaccggtttgtcgaacaggaagggcaagaaggggacgacctagattcatcataatacatcgccaggtcagaaacctgagcaacaaaatccgaatagacgtatcgattgagggactgacagctagaccggacagggtaggtccccaggccttgattcgggggttgacggtgttcctgaagacacgtttcgaggcgatagcaacggtctggtgaatagtgaaagcaggcagggccattgacgctacagcctggaagctgtcaaaggagcacgacaagtcaaaaaattacgtctaaggaacctgcttacgcctgattactactcacataccacgcttagcagcgaccataccgagacggctgttctcgcccagaccggtggccaggtccagaggagtcggaccattatgcttggccttgtaggtttcgtaggaaacgtctcccagaagatacacccaagaaacaccgtacgccgctcgtactgttcgaccgtcatcaactgaggtcagatggacggtcgtgaagtgtaacaagagcttgactcaccaaacatgggcgatacgactggtcggaatgcttcacccacgtccgaggctgtgcgatagcaacagaaacgatttggtcagctcgaggtggtattgttactgctttcggtccagaccggacgtactgtaagctgtgtaccgagaggccgcgctcaaggcggtcctcagtcggttggtgtaagccactgcaaatgggaagatgtgtgatcagaaggcatacacggtgagtcgtctgacttaagttagacttgctgtatcggatgttgctgtcagtagtatcgactgtaccatcatgcgaatggtctcaggttagctgatgacttgagccggaacacgccctctgatctcaagatacggaccatccttgtcggcaaactcatcgagcttttcctctcctcgctgctcgagctcgatagcctgatctacaatctggttgcttgacatagtgacgtaatgcggtttatgcttggggtataaacgattgcaagcagactagattcagaaatgtaacgctggagaagtcgactcatgtcatggcgaactgcggtgatatcgctcgaagagcgaaggggagacggttgcaggcatgggaagttgtttccggtcacccgggaccttttgttcatatgcacaccggtacgtcatcgtggattacctggcgagctgcctcagcgtgcacctatatcaggatctaccgcccgcaatctgtatactactgctggcaaattacagtcctatgctcgtacaaccattctttgcttgccgctctgccacactccgataggagccgggcgccaggctgaagaatcggccaatctccagccggtcgcggtctgggcatcgaccggtcgcgcgggcgccgaagcggcccgtgatgatgtcggcttgcggacagatttggcgttgccctgcaggttgtaaccaaagtgtaaagatcctgagtttcaagtctcgcccgcttcgtcattgcttacgaggttgcgtaatatggccaaccttgcttccatctcgtctagtggaacatccggggcggcatccgcgtcagaccgcagggtattttcagagtcaagcgattctggtatgatgcgttctgtacgcgagtggaaatcggtatcgtactcgcgcagagcgtggaacagagctatagagctggacgtccgcctcgatgaccatcagtacgtactcccgcgatcattctgataaagacgcctcggactcacctgccaggttccccttcggctcgcccgagcagctgacccatgatcttctcgaccaggtcccttcccaaatcttccctgatctggctcgataaccccaagttcagctcgatttcgtctaccttgtgcacttggtcctcgatcccgttcgtccagagcgcgatgagccaaacgtgaacggcaaacctgtacgtctgttcttccaaggccgccgtctccttttcgtcggtgacgccgaggtaatcttctccgcctccgtcgatgatcataaagtcctcgtccatgttcgctgggatcgattcaatctgatccaccgtttcccgcacgtgcacggcgggaatcaacgagatcaagaggcatttcctggccagagctttggcgagtgcgtctaccggttcatcgctggaatctttgtcgtcgtcttctcgtcgagaagtctgcgcaatgttcgataagacactgagcacaggggaccagatacgtagggtcgtcgcgtctagtgccggaatatcggttgggttctctcggtccgctcgaggtcgttttctgagggagtttcgagtggatctcaaccaatgttgagacgtcaaccttttccccaccaagttggcttaccggatcgatgaagggatcaagcagcctggtttaagtaggcagtcggtgagaacatcgatgacgacctcgacgtcttcctccgcgatggcctttgcgaacgtatcctcaatctccctcaataccaccctcaactccttgcctccagagctgacgcttttactggtcctctccctaaagtaattcttcatgaccttcttgtacttgcgaaatatcgtgtctaggcggacatccaactctgcccgtcgttcttgagagcgggacgatcccgccgcgccgccgtcctcggaaaagacgagaggctcaagagcttcgactcgcaagtattccaaccctttccaaaccccatccctgagaacttccaaactgggcaggtcctcgtgcgtagcttcgtgtcgcagaccgatcagaccaggggggaggccgatctgcctggcgaggagagacatcggacgcgcatgcatgccggtttgtagagggtcgaccaggccgttcgtgaaccggatcaaggacagagcatgggcttgtctcgaggcgagtctcgattgagccgatgttggggggtatggcagcagggtcagggatagtagcgaatgaaggaggatgaaagctaccgggacagagggcgaggcaacgtagatagacagcttattgaaaaggcaggaaaatatcagtgatggacatggctagcaaatagtaagtctgctagagacgtacacgagcgaccgcctgagctcgagcttcaaggttgctaaagtcgtcccagatcaatccatataggtacctgagctcacgctcgttgctccagggtacacgtcgcggattgaccatgttgccgaacgaatttgaatcgaaggtagtatctcctgagcagtacaatgtactaggagcagttgcgtgataagattattgtggttcgcggcttgacgatgaattatattccaatgacagttcaacttctacgctctttgatctctataacttgcccaaagttgggccgatctcgtcgatgtgatcacgtgaccgagctctcgtaaacacttccgctcgctcgctttcgcttccgcgcggaattcgggaccgaccccagcatcatgcccgaagtccgtcgaagcaaggtgagctctcagtcgagatagatcgagtccaagtcgaacttggtggtcctccaagcccctggtagcgaaactcggtcctttataataacctagctcttgagatgcgtttattccgtcctatattcggcgtcagctggctcgtggcatcctgcctggccaagaacaaagaggtcaacaccgagcgatacatcgacgggctcgaggatgcggaccttcggacgatactggacttgaaaccggaaccttggcggagcgtcgaggagggtcatctaggaagactcttaatacctagaccttgtcagttgagaaactgcgctggctgagctggacctgattgattaaacgaggatatttttttcgtttgcgtcctgcttcagctggatcccaaaacaagtaggccttgcaatccgcaggacccagcccaaatggcaagccatactgacccggccggcaccacgacagtaccgacgtgaggaattacatgaaggatgtatttgacaagctcggatggcatacagaagaggtgacgctaccttcctaactgctgaaccacgtcctatcccgcagtcgctgaccgagatatcgggaacggcagagctcgttcacctcgaccacgccaataggtgacatcacgtttacgaacctgatcgcaacctttgatccagatgcaccgacgaaattggtcttgtcggctcatttcgactcgaaacactacgacacgtatccggccaaccaggtccgtccccccaacccatcgcatcgaatccaagatgtcgactcgctcaagtcgaatctcttttctggttactagttcatcggtgccacagattctgcggcaccatgctcgacccttctcgacgtggccgaggcgctgaccccgttgttggagcggaaacgtacgctcgtccaggctgacgagtacgacggggacgaagaatgggcacatacgacgttgcaaatcgtcatgttcgacggagaggaggctttccacgattggacagcgaccgatagtatttacggggccaggtgggtcgtatgcggtcttaggatagcctattcgcgagctgaccagatcgtctcgcactgcagacacttagcggaacgatgggagacgactttcttgccggacacccatgcctaccatgcatcctacctctcttcccggcggtatgatcctaccccttcgatgctatccactatcgagcatctagtcttgctcgatcttctcggcgcacccaatccgagcattgcgagctattccacccggacgcgctggttgcacaaacacctagccgacgtggaaaagcggctcggggcgatgaatcgagaggggctgccagcgaagggggagtggttcaaggggataggatgggcgggcgcgattgatgatgatcatcgaccggtgagtcgaggctggagcttcggatcgaggatcagtaacgggaagtgaacgatcaaagctgaaatgaaccatccgagtacagttcttggaacgaggggtgtcgatcttgcatttgatcgcaaaccctttcccatccgtttggcatacacttggtgtcagtttcgttctcattgaactcgttgggaagcaagaaactgacgaacctcttgatctcactctgtaggacgatgccagcatactcgatatgccaacgttgcgaaagtggaacgccgtgatgcgaatcttcacggccgaatacctcggactaccgatcccaagcgccgcagccgagcgctcgatggccgcaaggacagtcgatttggtgagtgtagacgggcgatcagagtcctcacggaattgagagggaacggaagctgatcattaggaggtgtctgtcgttatgcattctgcatcgttctcgtggaaccgctcgtactttgattcagtagctatgagactatgcgatatcgtgatagtcagatcgagcacgctgcagtggttgtggacgcaaacggatcgatcaggcggtctgcgatcctatgtatcgtggcaatatgaacagatcgccaggcgagcgtaccccgatgggttccatcggctttactccggagctcgatgaagcccatgtgaagctacgtactgaaccgtcatgttgcctggaggcgacgcacttcaacttgcgcggattcatatggaaggcggtgcaatagtagccgagggatagacatcttccttcaaaggggatgtcagggtcgacgttttttactttacttttcaagatttgcttaggctcgctatccctaatgagatcttcgacgtggcggtgtaggtcgaagcccatgatgaggcaaaaaaaagctatgaagagtgcgggtataggtaacacttgcgcaaatgtgtctgggattattcagctggatctctgactgtcctggaaatcctaaagctcgatgtctcatcttcctgatggtgaagccggagaattccaaatatcatgcggatgcttttgcatctagcagcaaccagcaaccagctaccagccatggccagccagacgactggttactgctcgaactatcgttacatgacgcagtattcgtcgtccgggaaggcgtagaaagcgcgtgtgggggttcgatggcgccaggggtggaccactgccggtgactttccgtgaccacgtgtcgatgttccagtttctctcggaagttattcggcgctaaggccaaggcctatcggtcgcgtcaacctctcggattgtttggacaaagagtgattgacagcttggggtgagcccagattgatcaattgcaggttgacctcgtatctggtatctccgttgcacaggctgcagacagggacctgacgacaaatttctccgactacccagacactcaaacagtcctttttccggatccgcccatagaggcttgttttccaacaccgacggttttaccatagattttgattgaatcacatccaccaagacttgaagaaggattcttcgatcttcgcctgaacaaaccccttcaattcttgaagtcatacagaatcgcgactcttgaaggtcatcgcgttcgagtgacactcgagtatcaaattcaatattccgcggtttgcaacacaggagagggaatcaaaggaactctttccttgcatttgatcttggcacgacccaaccgggataacccatctacctgtgaacgactctgtggaggcaacaacacctttcagttcaatcgtttttattgaatagtaccctcaggaccaatcttagctctcgcaacataccggatcaccgctaaacaaaacctgggcgaatcaggcttgatcgggttccccccagcgtaatcactattgcacatctccaaatatgtggtcaatcaatcctttcgcgatcactgctatactggcgacattcgtcgcctcagtatcagccctcgacaactggtatactccccctggcggtccacccgtaggatcgggattcgaccccgttctcaacccctcgtcccagaagatcaagggtgtcaatctgggaggctggttgatcctcgagaactggatgacgccttccgtcttcggtgtcgccgggttacctggcaagggggacgagaggagcgtcatggatgaatggtcactttgcgaaatcctgggcaaggaacggtgcgccgaggtcttggaagagcattgggagacgttctacaccgaggccgatttcaagaggtacgtctgaaccacattgcaggtggttgaggtctcgtgaatatgacctgatcacccataccccaacctttcgctctcactataggatggcagattatggacttaataccgtccgaatccccgttccatactggatgtggaatctgaccgagagcgaaccgtacatcacgggatctcagatcccccatctccagcgagcgctgaactggagttacgtgtatggtttggacgtcatcctggacatgcacgcgttacctggtcagtccgaggtattggtacgtttcgcgtggtatgtaggcgaatgctcactcgcggcacgtcgattgcatctgcgcaggatcccagtcgagttaccaagtccacaccggcctgtatgcccaggaagggttctctaattcgaccgagaatatggatcgcgctttgaacgcgatcgagcagatggttaccgagttcaccaaggaggagtacggcggtgtcgtcacggctatcgagctggtcaatgaaccttggatcgaggcttacatgcccaataatatgccttgggagctcttggaagagttcatggtcaaggcctacgacgtggtcaggcagactgagacgatcattgaaggaaggcaagaagtcatggtgattgtgcacgatgcctttggctccttaacggactgggcgacccactttttcgcccccagtggtcaagggcacaattggacgaattatgcgcttgacacgcacgtctatcaggcttggtcaggcatcacttgggacgaggggcatgtcgagtcagcttgtgcgcaagcaaattacctggaagagacgcaacgtagcgtgcctgtggtgagtccacgcccttgcgaccttgtttgtcttacttgaagagctgatgaacgaatttgcaacagatcgtcggcgagttttctctcggcgtccagaccttctgtgtcgattacaaggactgcttcaatttagtcagtacgacttctatccgggtatcgagaagccgtgctgatctatatcgattatccgcctccaaaagacgttggcagacgccctaacgaacatcacttcgacgagcggggatcgagatctattcttgcggagtttctgggaagctcaaatgcatgcctacgaacacactgcaggatgggtaagtgcctttctagggaccgggatcgttgtcgatgctgactgtacacgcaacctgtcataccatcagatcttctggaattttaagaccgagctgtgagtagcctcctgtacgtctggtactaaggaagctgttgactcatcgaatactatcccagtgcacccacatggagctacgatcagtccgtcgctcaaggctggatcccggtagacttgtcagaccgagtgtgagtcgctcacgtctatgttttatcgcaaaatcgtattgctaacagattcccgtaacgctctagctggcaatatgacgcttcccaggcatactgtctacaaaaccagaactggagcaacatacccgactttacccccaatacgcccgcacctcttaaggctggcaccgcgactcccgttcgagaacccatgactctggcagtccaaggcgctcttttaaactcgagctcgagcaccgcgatgacaacggccactggcggcatgagcgcgactctaacgggagctagcgcttcgctgacagggacccctagcgagaccagcgcttcgagtggcggggcgaccaatgccgctttacgacaattgacgactccgtcctggacatggctctttatggccacttccgggatgttcttgatgacctaaaacatcggtacaacgcgtgccgcgttccacgttccatagacctgccttgatatctagatgcgtagcataatagactatgatgtgtatccaaccagatctggctttttttttccgatcgactcgaatgatatacacgcatagcagtcctgctcggatggaaggtcgtggtctgctgttcattttatcttgcgaagttgatcgggatgccgatcgcacaccgtctacactgctacatgtgtgtaccgtcgccgcactcgacctgtcgcctgtcgccactagacttctcgaatttgattgagacgcgcgtgacctgatcgaaccgctgttcgccgaggtatcggtcaggatcaggtatggatatcaagctcttctcagctgtttgcataccaatcatctcgattcggatcatagcctaagctgatcctacttattgccaattgccaagccgtgtctgcgagatctttcatacgaaatcgtattcaccgaatcggctgcgttaccggatctttacccctagaccgactgatgacgaagcgggagcgtcttgtttacgatccccgatagtaggccagaactgtcgaatccatagccatctcgtctctagacccctgctggtcttcgggactcgatagctcgcttagcggacacgacagaccattcgcccctatttgagagagcggttactatggcttcgacggacgctggctatagtctgggcgagtcagaagctttcacctccccccggtcggcagatccgtttgcggtcccagatcctttgagcgacagcgaagaggagacgcctcaatcgacgataggtcgtgccagcagccggcaacggactattctgcaacatggaagtccaagtggacgaaactcccccctgactcctgcttatcgcgatgccgatagttacaacgacggcagtaccttgactgtcggaggaggaatccaggacgataacgatgacgagaatgagccaccgcaaagcctgctctatgaaactactgcggacgatcaacaaatatcaccaccaagaagggatgcaaggaacgatggttacttcgataaatcctctcagtcatctggaatgcggcgaaagtcgggcgagctaccaacccgccagtcaggaagacagcatgccggatccccctttctggcacagggcgaagacgacgaggtcgacgagctgatcaacgaccgagatctcgggtcctcttccacaccccagccatacgaaaggagtaggacaggtttcactgctgcgggacgtggtatggccaccaatcctgacaggctcgcaggctcggtgagatcccctagccctcctactccacatgctccgctcgcgcagccatcgccagtccggggaagggggaatagtaaagggataaggtcgacgatgacctcctcatccctgtcaacatttcgctcgaactccgcatctccacctccggacctgctagagtccggctcgatatcctctgacctggagtctctggagcttggcaatcacagccgacgggctggtcgacgggccaagctcatggacaaggacgctcagcgaccactcctacccgtaccggtcacatcgagccatgttgttcaaccgtctactcggaacgatgagagcatggatacaggacctagtcgggatcgaggccgggcttcgatagacgatccaggccaacacgcgaagacgaagagcacaggtcaaaggactgatgcaagagacgacgtcaatggcacgccacctgcccaggaaaagaagaaaaagcatcgccgcagacggcacgacaagggtggcaatcggtcgagaccgagcagccgatcggagggacagctaggcgcggtcggaagcggtataggctggatgaaggatgccggtaggaacctcagtgacagggagagagcgctttggatttgggtcaatgttgtggacctggatggatatctacaagaggtacgacggcacgcaaacgggtcgacgacagggacgcttacgatctgactgactgccacctttctgttaaggtctatgattattatgttggcaaagggctgtattgcatagcattgcaacgaatcctcaatctcttgtaagtcaggacatcgcgagctgttgcttgaatgaaacaagctgagtcggagcgatcttcttagaacgtcggggttcgtgatcgtgttctcgacgttcttgttctcttgcgtcgattattctcgattcccctcggatggtcacggatctctatccgaagtcattgtcccacactgctcaagcaggtacgccgatgactgtcttcactctcgtggcctttcacagctgatccctccctgatctcatgtaggtggtcagtatcgcatatcgctctcacatgggtactagccattgtcttcctctggcgactactggtcttcgctctaagcacacggaagttgatcgagatgaaggcattctatgagcacctactcgacgtgcccaacgtgtgtccaaaaggtatagttgcccgacgactcaagctgagtatcgcgttttcgatagagcgatatccagacgataccttgggcagaagtagtgaagagaatcggacagatccgtgacgacaaccctaccaccagcttgaagggtcccgatggcgccgtagcatctgatgttgcagaccatatcaagctcgatgctcatgatgtcgccaagtcagtcattaccgcttgtccgcgatagcgtacatggtcgctgacaggtgtctatgctgcacagtcgaatcctacgtcaggagaactatctcacagcgctgttcaataaggatcttctagacttgcacgtgagaataccgctcccaaagcgggccgctggacttcttcccggtcgctttgttcgctatgagtcagacgaagaacgtttctacctatgtttcggtcgcaatgccctcactcgggcgctggagtggaatttacgcttctgcctccttgggtatttctttgacgagcgcagacacgtcaggaaagagttcattcgtggtcttaatcggggtgaggcaatcaacaagtaggtttactattgcccgaattgatgttgaggtgtattgacttcaagcgtttccccaggctacgcaatcgattcgtcttcatgggcctcgtgaacgcgctgttcgtaccattcatcgtcgtttatttgctcatgtattcattcttccgctactttgaggtgagtcatcccgataccaagactttccctgcaagaacgatactgagttatggtctcgatggtaggaatatcacaagaatccgtcgtcgatcgggtcgaggcaatataccccctacgcgcgctggaaatttcgcgagtttaacgagttacctcatttattcgagaggaggctcgacgaaagctatgagcccgcaaagcaatacatcgaccagttccccaaagccatcactgctctgattatgcggtaagccttgcgggcgagccaaattcaccgggaacatgtccgggctgacgtatcggcgtcggggaaaactgtagcttcgtggctttcattgccggcgctttcgcagcagtcctcttgctgttatcagtgatcgatcccgtctttcttcattttgaaatcactcaagatcgaacggttctgttctacttgggtcttttcacttcgattctcgctgtctcgaggggaatgataccccaggagaccagagttttctcacctgaggaactcatcacagaagttgttgcccatacgcactatatgccggacaactggagcgacaaactgcattcacaaacggtgagcttacgatttgctgtgcgcatttcgttcaacttctgatagcccgtatgaaacaggtacatgcagaattctcaaagctcttcgaaatgaagctgtccaatttcttgcaggaactgctttccgtattgttgacgcctttcatcctcatcctctccttgccacgatcggccgccgctatcgtcgactttttccgcgaatttaccgtgcacgtggacggaatcggatacgtttgttccttcgcagtgttcgacttcaaacgtcagggcaaggtgagtctcagagctttcggccagccgctgggtgttgtgctgagttgtttccgtgaattatcatccttcagctgcacgaaccgccttcggaagacgaggacgcgaggaagtcgctgttcaatcgtaatcgcaagatggaaaagagcttcttacacttcaaggtatatcataccgtattgcgctcaagggataatggaaaagtgcaggaaggcctaacgtctgtctcgtcatttgtttcagatcacgaatccggcttggcagccgtcggatcccggcgcgtctctctttctgtccaaggttgccgaatcaggaggacggaatgtcagtggaggatcgcgttattcgaatgacctccgcaaagcatcccctacatcgatctcaggcgatcagcaaatgcacgatcgttcgactatgtatgagcgcgccttgcagcgaagtatcatgcttcggggcacgagcaagcaaggccttcagggcgtgactgagacttcccgaggagtaggtcgacttcccggtaccacaaagagcacgtatctcgccacgatgaaggaagcagacgatgggttggaggaagaggccgaagcagatggatgggagaccaagatggtgcaacgccaggacgccgatcttgagctctcgcgaggcgaagcggatcggcggaacaacggtgtgcttgacatgctacaagatgttatgcggcgttgaatctttatgcgcagtgatccacagttgtaattctcgtttattatgtgttttctgttgtactcctgagcccgtgatcataggcatgtcttcatcgacatgcctgctctcccgctgccccccttggtggtttgtattcgcgtcgcccttccgttctcgctctctgaacaatcttggggcgctcgtcgcttctttctcgaagccgggtcgatggcgagaggtcgtcattttcttgcagaaatcggtatcgatgatgttatcagctcacgcatcgaccttgagctgaaacaacgcatcaatacaatatcagggcaatagagtacacgaaattgaggactggttcattttcctagtcgcatcatgtccttcacctctttcttgaacgatcggcaaacgccaggcggcgggacagctcagcctcagaccgccaaccaactcttcggatcggccactttccaatcgcaacagcctgctcaagctgctacagggtcttccgaattcgcacccgatgcaccagctgctactcctactgcttcggatctcttcaacgcctcggcatatgaccctgccaagctgcaccctttggccgggctcggtgacaacctggattacctcttgttggacgaggccaagttgcaggagctaccgggtggtcagagcgctttgccaagcaggggttggtcagacgaattgagttacggaacgggtactacgtatctgagtggcaagtcatggtggctcgcagattacaccttgcatcgagctgaacttgacttttccacgctctttccacttgctctcctctacttcgaccgggaacaaacgcaaacatccactttcgttctgttctccaggtctggccattggaggtctttacggtgtccaggagggtatgcgtcgtaatctgggaacgtcatctttcaagctacgactcaacagcgtgttgaactcggtaacgcgaagaggtagcttcttgggcaacagtttgggagtacttggtgagcgaatctcaggccatacatttcgtcgtccggaccgctgaccgttgcggcctacatgctccatttcagccctcatgtacaacgctgttaactcgacgatcgacgctgtccgaggggaacatgacttttacggtgggatggccgccgcagcgatcagtggagccatcttcaagtctacaggtgagcctcctcgagaactatcatatgggaccgcgtatgacatgtcggctgacattgctcggtccgtttttctagctggagtcaagcccgctcttgcaggtgcaaccatcatgatgggcgcctcagcagcttggaccgctgccaagaagacgctgctctaaacagccacacccatcacctggggtctgcttaccaaaatcaaaagacgcccccaaacgcaggcatcacgtcgagtcttcccgacaaatcgaccctcatctgccccctcgactttccttcttccgcttcctggctggctatcttcgtgtatcatactaatcggacagaaatttcggagcatatgtactgtccttgagactgccttgtgacgataacgatacatcccacctctgcgtaactcggagaacaggcttcgtctttgcattgaaccacgcttttgcccgggggtgatggacggatgccgtaatcgatttccatgcgcgtcgcgggaacctagaagtgtttgaagtgtaaacaacagcttcctacatgagcaacaccagagtaccagaagtacctgtgccgtctgattgctgttctagtcgaaacgagagcctgtgctggtacagtatagctgacaagtggccaaatccttgtcacgcataggatctccaggtgtctgtatatacgaactatctctccggcggtcggtcgcatcatgtcgacaaagatcggcttcatcaccccgcccaaggccgcaccgggccctagcttaagccaggttgagaagcaacgactgatcgaaaatttgcagctggaaggtgagtaccgtagtccatggagatctacctgaaatagcttgactcattctgagcgcttattcggctcgaaacgtcgtagtacaagatcggacaagacatttccatggagctctgacggacatactcaactctttcttggtgcgacaagagtcggagatcttgcgtatcccgaaggatctgcggaatgtcaagatgaaggatctcaaaagcatgtggggaggagattgggcgagcacgctgaggcatttgaaggaggaaactttgaaggggaagatcgagggggatcggatagaggatggaaccgcacaggaagaggatcctgcgagcgatgaaaacgatgacaaacggaaacggaaaaggcctgtgctgaacagcaggacaggatcagtcgagacgccgacaggaagggtgaaaaagacgcgtgagttcgtctttgctcagaaataacgtttgacgagtacggctgaacagctctggtctcgctcgtggtcacagctcgtcgagcggaaaccccatcaaaaactcccgctgccacctcaaaggctatcgctagcagcgcaaagacgccgatagagactaaatcgaggctcgctggcttcctgggcagcaaattgacacgaccactcctcgcttcgcctaatacactttcgcccgccgtaggcagccctttcaagcgattcggaatgagggcgactccgacagcagcgtctacggcgtccccttcaaaaccgggccgcttcgccgggtttaaactgccgaccatgtcctcgctaagccgaacgacgaccaggaatatgatcccggctccagccgccaagacgttccagccttctattccagaaacccccaagttccctcgaaagctaaaagacacggacgtcgtaatcagcgtcaatggaagtccgatcgataatccttggacggctaggaaacaggaggttgagactagcgaggacgaaaacgaattgcccgacccagaggcactcgagagggccatgctagccagggcgacaccgagatttgatccgggaccatcacgtctgaaccggcaggctgatctaccacgccagatggggaggaagagggtctcttctatccggatacgacagtccatctcgatcggacagccagagtactatgatccgtttgtcgacgcaacaccaatgagaccgaaacacatcggaaatccctcggacgtcatagtcggcaccggcgaatcgcccgctcggatatcaagtcgaggggccatgttgcggctgacgacgtcgtccgggttgacgatcgacttcgatccgttcacagacgatccggacatggtggaagaggagctcaaaggcaagggggtcgacgaggatgttcggggacaagtgaggagcgagatggccaagaaggtaaaagagctccgggaacgcctcgctaggtgagttcagctcaagccgtacgtctccgatttggcgcttcctcgctgactactggactctcgtcattctatagcttcaaaatctaatgacaagcggccggcgagcgcggcctcccggtttacgactacatacgacatctgcctacgacgagtccgaaccacaccagtatgattaggttgtaaccgagtatcgcgttggaagtacaaaggctgcatctacagttcttctctgacatccataccagtaatctcggtcaaacaacgtttttccatgtccttgtccatcatctggcccgacttggtcagaccattgtcgcgacaccacgcgtatgcgtcggacaatagagtatcactcagtggaatcgaataccgtgcgaacaacatgatcaggttggccacttgagagatggcgagacgagatgcttgcgagatttcctggagggttatcatccgagcggtaacccgttcagcgacgagatcggatggaatagagcagagctggctcacatcattggtatcagaatacaccccctcggcgtcgacaaaaccctcaacggcggcattgttcctctcgccaacactgacgctaacccagatgtaaccgttgacgcccatgatcacgtccacaccgagtggtccacagggcggaggcaaggtatggaagtgggatttcagacggcggatgagggaaggcggcaccgtaaggagaaggccgttacgcagctaaacaagacagcgggattcgtgtcaactgcaacgttgccaaatgtcggacgcagcggatgatgtaccttgccataccgcagcgaccgggtatggagttgcggcgcgttctcaaccgattgtacctcggctaccaataactttacgatcatcaggttcggagaccagtcagcaaatagcggaagtcatgaagagcaacctgcatgataaagcttacatcgccctcggccagaaattctctcatcttcaaagcatccgtctccacttttcttcgctaaagcgccatcaaaatctgggtcaggtggctaatagcttctagaaacatcttgaggctttacctgaacaccacctggaaggttgaccgagctcaacgagagaatagcatcctgtcttgcgttggtgtcgactttccatcgttgctgtactacttcgatgactcggccgatgacaagatcgcctttctccgggttatatctgcatatgcgctaattcagtaaaagctatgagctggagccatcagaatatgacctaccgctgtcggacggatcgcacagagacgagtttgttgacccgctcaatagttcctgctactgtagacagcacgttgtctccttcggtgtacgttccatgacccctcatgaactccttggcactcgtgacgacttctccaggagaagtgatgctcttacccgctcgcgagctgctcccgacattatattcgtcaatgtccatttcagaatcgagatcgtgctcgacgtccgggtgatgtcgagtcttgctaaattcggccgcgacatcgtcggcgtggaacagcgggatgggaggaacagaaacgacctgaagcatctttactcaacctgacactatgtataagaagtgtgtcgaagtatcgagttgtagtctaaatgaggaaggtcgagagtgtcgagtgaatagttgtagctagcatcgagtgacgatattttgccaagttctggccaaaaagtggaggtcgatcgggaaagtgacgatgatgcagctcctaatcatggccaaacgtacatcatccttgcatatctaaactcagtctcagctacttgtcagggatgagacaggagctcgcacagccggccacacagactctgctatagccatgttcacaccgagggttctcggtgccactgtccaggtcgctcggaccggtttagtatcgtacggatctacctctcgtctcgctcgggcggcatccacttcgtcccgaatcacatgtcgggccacaacactggcctggtgcgcaagcttctcgaccaaagcgacttggccagctgctggtccatcgatcttcccggcgcagtctgtgacaaatcctgcaaggccgctcgccgatgcggtctcgctgggacactccgagaggacttcgcgcaactcggcgggcccggtaacctcgatcctggggcaaatatcagcattttcaacttcctcgaaacaagctctgcgagagtcgtactttcgccgtcctaatggacgatcgagctcgagtggcagtggttcgggaggttcgggaagaggcggcccaggatggttcgagaatctccggcgcaggatcgatcgtctgccaccgatgtacatcatttacgggatcatcggggcgaacgtagggatcttcctcgtctggcagtatgcacaggcttcgtgggtgagcttacaggtcttgagagcttcgatgatctgacaggacgctaaggcatattcggtgcttgccttttggctccacgcagactcgattccgagatcccactctgtaccgatggatgtcgcaaaacttcatcgtatctgaagccaatcttgcagcaggacgtctgtgagtagtgttaactccgctcttccgtgcgaggccaaaaagataacgtagctgatcactcgatccccaacagccacaccttgttgacatgctgtttctcgcattccaacacatcgcacatcgcattgaacatgcttggcctctactttattggccccgccactgccgggtgagcatctcgcgaattttttttccggctaggtctcttttgctgaacgatctgcatacccagtctccttgggcccgctagcttcctaggattatacctcggaggaggtatcgtgtcgtccatggtctcgcttgtatggcacaggatgatgtcgagcagccgagcgaagaaccacgggagtgaaggtgcaagtggtaagtttcgcgtcgatgatgcctcttcgcttccgcaggtgggcctgccaccaccagcatgctaacaatccgtatcactcgatttacaggtgccatttacgcatcgcttgcctactacgcagcgatgttcccccaagcgcagttcctgcttttcttcgtcgttcctctgccggcttgggcagcggtcgggggcatctttgccgtgagccttggcagctgatccgagatcacctataaagctaattagcctcgttctgtcgcagtacgatttatactcatcaatccgctctcccgtaagtgctttacgtgcccgctgatatctcaatagacgaagaattgcttgctcatcgtctgtgcttcctttgatccattagatggcggtaacggactcggccggacacgtaggtggtctgttggcgggagtagcttatgccttttggtccaagggtcgaggaggacctaggttcaggggtagatggtagagctataggcaacgaaatggcggggtttcctcgttcgtataagtatgatggttattactgagaaacaacaaaacgataatattggcctgaaccctgatccggaatccttcagatggccaaatcgatgccgtattctggcttgagacgcaaggtcttgcgttccttacccatgctgcgcctcacccatgacaaaaggaccaagcaagtggcaatacatgtagtaaccggttcacgaaccctcttggattggctcagactcctactacttcttgacctctttgaccgccaccatcatccaaagtgaccaagtgatgcaagtagagcgcgatgatgatgatgatgacgcgttgtggcgcgggagatgagcgagaagctgaatcaaccattccgctcgggttggactcgagtctaccagactcattccgcacatgtagccatcgacaaatgatcggcacctatcttctatgtcagtcaccgatcgagcttggaccgatctttcctcctcaaaaatcgaaacgctagcgttaatatgccttaccgactagagatgaccactaacgctcggcgtagctgtaacggcaccaagccttgcaaggggagcaagatcgcaaaggggcaagccgtctttggcacctgggttgcattcaaggagacaggaagcttgtgagtactcgattatagagtaatgcagtgtggatagagtggcgagtagaggtcgaggcagaatcatcaggacctgattgaaaggatggcatccggggtggtagtaaatggagacatctggcctgtctgacgtgagtacttgaggcagctgatggtcgatctcgaacccgaatacctgagctgatcatcgatcaacggctctggacagtccgaaagtcatccaaaacctcaagaaggacttttccgaacctagcgaggtagatgggtacgacgagcttcagtcagtcgtcttttacctgctgcactcggtaccgactcgccgctgatcaagcctgagtttggctgatcaatagccccgatgctcaagtgaagttcacgcaatactttgaagacgaggagattccggctgaggatcttccggaatctgctattcccaaaactgaagatgagggagccgaagaggaggacggaaaaaagagcaagaaggatgcaaagcgggaaaaggcagctggagacgaagaagacgagaagccgaaaaagagtgccaagaaggtgaaggtgagaacctgcctttccttggatatgtctccactgcggaagctggagtcgacctggtcatctttgtttaggatgataacgagactaaaaaggagactgttagcaagaaaaaaaccgcctcgaagcgcaaggttcgtcgcccttccataggtctccttcttcactacgcacgaataacagctgagagcgttcttcatctaggtcaaggaggccgagagcgagagttcggctttgtctgaagaggaagatgtaaagcctgccaagaaagccaaggtaagcagctgagtcaaaagccgcagaagcgcctacgacagatggtcagactcgtctaagcttcgaatctgcattattccagaccgtcaagaaggaaccggctcagctcaagaggagcggacgggctgtaagcccctcaactccattgtatctgctcgtgcaatatcaggctgactcgggcgggatctcgtccacagaccgcaaacaagaagactctgaaagaagaaaccgacgaagatgaggacgcatccgaagtagagcagaagaaggctaaacccgcaaagaggggaaagaaagtgaaggcggaggaggagccagtgagtcatcggtcatagctacgtcgatccgcttgacgtgtatcatttaacggtttgttcccggcttaaaaatgatagacttggtccgagagtgactgaaggaggtgatctaacgagacgacgcttcctttcgaaggctcacaatcatcacgcatgtctgtttgtccatgctgtaacctaattcccaagcgccttttctttccgacagtctcgaggtcgtcgtaattcgttttcgctgagctcgagagccttcctcgcgttcactatcttaatatcaaggatcttccctgcaaataatgtcgtgtatcaaatatttacggcgatcacttcatccgtcgtctgacgacaagacgtagagtacagtctcacacgcaatagggccttctcacgatacagaaaagacgagagcttcccatcctcgaaggcttaatcttccagctttggtgtcctctacgtgccgatagttggaaagcaagacctttccaagttgcatgccgtttgggacagaccaaacgcatgtgtcattgctgaaattgagaacgacaagagcccgtttaccattggcggcagcttctgcagatcgcgtgactgtgtaggcaaagatctcaaggtggtcacggtcaagtaggctgaagttgccgtaaacctagtaatagcagactgattaagcactacatgggatccgaaaatcaattctcgagatcgactcacgaagagatcgctttgctctcttctcagggcaatcgcgcgtttccagaacgacaaaacactgtctggttgcgtttcctgctgaaccgcagcataagctatgtcgtccttattagctaccatccagggcccttccttgcatgcagtgaagcccgcgttaggcttttgggcatcccactggttacggcggaaaggcgcagatatgagccgtggttaaatctttcctctacggtcgacacacgcacaggaactggcaaacggccattatctcgagctttgatgcgcaagtcacgcatgatatcctccatggccggttcgtgatccccagacttcgccgagcgagcagctttggttctgcgaacttatctcatatcagcgaagcaatcttcgattgcttctcaggccaagcgtactctttccagtaattctgttcgatgaagaacaagtaagaatagccgtctgcggtaatcagtccaacttgtgacttacgatggtttgaatatccagaagatcttcgatcttgtaatcgtcaggaacgttcttcatggctaattcttccccttctatgatcgtaatatcgatccgagcgaacggtcaaaaccggagaccgtttgaactgcggacctctgacgtacgatacaaatatagagttccgggttgtgtgacctgcagtgtggctaacagctgcgccgatcgagtccgccattctgatgaatcatctccccacttgctgacgactcgaccttgatcgtgatttgaagtcacagccgagttcctgtatgtacagattggacagcagccacttgagtaatccggaggacagagtcgctcaccacccgccttgacgatccagctccgtttgccatcggttcagacaatccttcaattcgggtaaaggacaactagatcgagatagatcaatggctgcgactctgcctcatgagagaaggactagtagcgtaccgacgatatttcaaaggattaccattcgaagaatctaaagcccagtaatcaaattggaagatctgcttgttcaacaggcgaggatgagaagcgaacaacgagaagtgtgcagtctccaatttggccgaaccatttgtaattgagggtcatcaggtttggtatacctcatggccatttcgggagaggtgtcactcatttcgccaacggtgatcaagtcgtagtctattgcaggacccaatcatgttcaataaaaacagaaaataaaggtattctccgcaaacgttcagcccacctttcaatgcttcatcatatagctcgcggaagtagttgcatagattcggactgcattcaacggttcagcatgttattgtcatcccattcattgagagggttgacactcacccgtgcttgaccaacttgttgcaattctgatatcgttgagtgggatcagtgatttccgcgtcgggaaggccgtcaactttcgacagtcgagagcaggcatcaagctagtgcgagttcttgtaagctaatgaccgaattctgttattaccaggcaaacttactctgaagcctgagcaacctctttccaaccaaaatctgacgatatcatagaatgctgcggcgcgccctgtttcagcaccttttctcgaagctattcatccaccatcgtaagtcttaccttgtcggactgcagggtgctcccattgacagtcaggttgctcgactgcgtattggtgaaggtagtactgttgggtctcgggagaccactgccatgctgaccctccaaagacggatttccaattattcggctccggtccgccttgcgattccggtcgggcatctctccagtaatagaagtctcgatacggggaagtctttgagcttttagccgagaggaaccaagggtgctaagcaatccagaatttctacgggatgagtcgaacgtcagactaaagtcgtgcatctcggctcacctgatcacttgtatgattcactggagaaagacattcagcatggaatttcacgttagatcccaccatcgggctcacagacgagatccatcctggagcacagcgagttcgaaggatatcagcgaatatcttgactaaacgtgtcgtagcctgcacttacatgatcttcatccctcgatcagaacacgcacgctgaagagcatcccagtcatccagagtgccatagagaggattgatagccttgaagtcgctatgcacgggaacgcatactctttcggaaatgaccggatacacagtagtttctctcgacttacgaaatgtcatagccgtaatccttcaggggcgaggcgtaaacaggactcagccagatgacatctactcccaaggacttgatgtagtccagctaatccgagcatatcgctcaatcagccagtcgttcgctagcttagctgacccgagcctcccacaacccaccttgctggtgatgcccgccaaatcaccaatgccatctgcattgctgtcgcaactatgccgaaagatatcatatcgattcattagaatggaacaagggatctggaagaggctgcgcacaaactgtgaggccagatctgatagactacagcctgtaggtatagaccgatcagatattgtatcgcttgacatggttggagcacctgaaacttgcctctttccaccatttcgggtcagacttattgggaaccattattgagctgataaacgatatttacaacgtttggcagaaagcagcttgctagaagtccaccgtaagactacaattcttatatctggctggcctcatattcatgtaatagcaacctagcagctagcagccccagcagttctacgcggtcgatcagcagagcagcttcctcggcggaacttcggacactattagtgcgtggtgtcacgtgacgttgattccaacaatgtgaaagtaatttcctgtttatttccacctagcgaaagatgctacatgatacatgtgaaacgcggtgaacaacaaggattaagtgcaggagacatgccatcgcctctatcgcgtttgaacgaccggtatagcggtcccgatggcagagtcataacgttggtcgggtatagagcgtcaatctatgctacaggaacgtggccttttgctcgcatgtgcgccaggaagagggtcacggtgatcgacctgtctcgcctgatgtgcgacggaacattcggggtgttcagtggcctgtttgagaaccgacagagtccttcacaggacttttaaagagcgctgaggtttcttccgacattctttgtacttctccgaccaataggaagattcagacctgggcgagggtgttgataccggcgtggaagcgatctgtaacaaaatgataggcgaatggttctgccgtcgctaaccaatatcgaaacatcggtcatcttattgcaatacaagcaccagcgggtccaactaggccgaatagcctggggagggtataacctaggataccagcgaaggttttgtcaatcgacacggcctaacatctgtgagcctcgttgttagcttacacgaagggtgaccgtggtaaaatatctggtcgtccggatcgattcacagctggtcgtcatgatacacatgtgtctttccaagtgacttaaaacgagtctctgcatgatacatcttgaaggtgagttattttaccgagcttcctaaccgcgccgtcaagcatgccctgacgtagatctttgactttcaacatatgtcattcaggaagattcgcaccatcatatcgtctacaaacttcttctgatcccctgcttgccaaggtgctctaccgagatgagtttcagacacgtcagcgccttctgcactgctttcattcagctcgggagtctcgcttaccggccgtaatggggtccatcatttgtctccccgtcaaagtgccatgaccaggtgatttcgtatgaatccaggaacgaaaggtcaaccctcgcttgcctggacaaccacgcctcgaggtaatcagcttccaagaggttaatcatatccaaactggctggattcatcggtgtagcctttgcgtaattatcgaggtggaccggcggcgtgactgagaagcggtagacgatcttcggtacagctcctttgcgagtctcgccgagtttgcgcatgtagtactcccacccgaattgaaagtcatccataaaggcttgcggtgttgggcgattccacgcatcatgaagaccggaattgatgatgaaggtgtccactcccaagctctctgcaaagtacttgtcatgccggtcgatttggacctgatgtcgaaagctgttcatcccgagccggttaccctccaaccaataatgaccgttgaataacagagacattctcgtccaacgctccggatgcccaggatgggtgatgttgacgtccatacttctttcgaagtccttgggaagcggcgtgtcatcggggaaagggtacgagttgcctaagaacgtccacagcgtgttgcgcatcatatctacgtgtgccgaggacaatactgattagtcacaatcgcacgttatctgagcgtcccgacggtccagcgcaccttgttgcgtggaatcgccgaggaatccaatccatcttccatccaaacactcggacgcttcctcttgcgtgaatttcttgacagtacaatgaggcaactcgaaagaccagctctcgtctgtcaactcatgtcgataccagtatccacctgtccaagagactcgatcaaagtcgtttgtctgacacggtggccgggtgcccatcacgtcttttgatgttgaggggatgacgactagagtggtatccacaaccagctctcgcgcaaagggccccggacctttttcgaactctccctcgatctcgtggtcgagcaagatcgcttcgtatgcacggtacagcctccataccctcagtctcacttcttgcccgaccacctcgagaggcaagaccagaggctcgccaacgaatcgtccggacccgtcgcaaggagggttgattttgatgcgggaacggtaatgaggtgtctctagttgagtctcgtagaaatcgcccagtcccgggtttggtgcggagcaagaagcgagaattgccaagatgtgtggagtcacggcttcgaggctggttatatataaaaatgagagatcatcagcatttacagggaaacagacggtgaagcgagattgacgtttccaattgatcgacgtcctgctcattcagtctgacctgtacctgaccctcctcaatgacgggtgtacaaaaggtcgagacgtgcgtcccgttgagttccgcggctttgagatctccgaccagactatcatagagacgcaaccaggtcgctgctgtctgtcggaaagatagcctgtaaacgatcctgacttccaggccgtctacccctgtgggagaaggctcacctctttctgttcgccctgactgcctagatctccttctcttcccgaattccagccgatcgccttcgtatcgaatccatacggaactccgaaacctcgaggaccggaaaagagccatgtcccgagagagaccgatatggcgaggcagcagaggaagatcaacgccgggcgagacctgagaggaggtagatcaagcgtgcgcattctccgggtaaggctttcgggagaaggacagtgctcgtggttcaggctagattgaacagccagtatgatgacatgactcgttatacggacatgatcgctaactcggtcgttgatctttgagccgcttcatcaactgatcgtgcagccctagctgaacagcttgatgctatgttcgacggagatgtacgttttcatgttcatggtgtgctgttgtgacagccgattatcgcgtggacacgctagccgacatcgtggagcggagctcgtgggcctggagagagatagatgcctgtatcaagctatcaacatgctcatttctacaggcaagatttgcatgacgggtagctatctagctactgcgacttgcaatacgttctttcgattacttgtcgcccaattcatatacaattgaggctgtcggccgcctcatgcctcatgcccaatccctgagcccttacaagcatcctcggtgatggttcttgtcggacacgggccgggtctaccggcggacgtacctttgtctcttcacgtgcgtgacagccgttttttcgtcgttgacgcgtcggaagctattttgcttgcccatcattcgatcactcatcagcaatcacgatatcacgatcaggcttacgacgccgaagggagggatccgcagcgattcgactcgaacgatccttttgcatacaaggtggatctgtcggcttgaacttcgagagagcgggagacatcttgtcgttgaaactcgaagaagggatgtcacccccatcgaatcgcctaaacacgatgcacgatgaacatgtatgagccgatcaatcgacccccattcttggtcagattttccctaatgccatggctgattgctgatgagggaaaacggttggtgtcgcgttcggcatcattagtaagcgattgaagcgaaacccggaagctgcctcctctcggtgcggccggccttgcgcccctgccgtgcccgcccgccgtaaacggtctagacgcgtagaaaagctgtcaacgagctaccgagggcgtgaccctgcacgtcgagagttccggtggaagagtcatgatcgagagaaggtaaaggtctgtctccctcccgcatagcttatagctaccacaattttgtcaggccgtcgttcacatctatcatctttgagccgacgctcgctcctttgcgctcgtggttaccttctccgagatcactttccgaacgaccaggcctcccaccaccccgccttggattctagagtttggccgcccggagatagatagacaagttgacggggcgcgtcctaagctcccgcgatttctaagaggcagcagggcggaaagaaagatacaacacgacaaacaggtcgacaagcgtcttgctcatcgggtcaattttccgctcaacgtcaagatcacaacgactcgatagcagagtctctgattcagatcaagagcgcctagacacgctagtgatacctaccgtctgatcgaaccgcccgacgcgatctcactgttccgagcgggtcaaaggcgttgacaggaagcacagcaggacggtgcttcgggtcctctaccaggtttcacccctcacagcgatcttgacggtataccctgcagcacttcaatcgaggcaagatacctcaccctctggacagcccttccttcgactcgaataccctcgacggacccgattcaagcatttctgtcttgaagtggcgagggatctaatccttataatcggcatcacctcctatcccctacacgcacacggtcttttcctctacaatcccctctcatcatgttgggcaaagaatccaaacaaacgtacagcccggacggccgcaaggtctacgtgcctcagcacatgaaacccccgggcagatttgatggtgtcaagaagtcgttcgccaaattgagcccatcagctctgttcgccaagaagcctaaaccacctatggctcgggcggtcctggtcaatgaacccctacctaccggtccagactggagggacaagaagggaaaggccgtacgggacagggtgtaccccaccaaccagaacatcacatcgaaatacacggtcatcacgttcctcccgcgaaaccttttcgagcagtttaggcggatcgccaacggtgagccgattactgtcggtacgatgttttagaggtcttgcagctgatcgcgattccatcccgcttttgtagtcttcttcttgggtgagctaccgaaatgcatccttaatgagctgtctgcatggcccgactgatgatcttactatgtttctcatcactagccatcgccatcttgcaattcttccccaaattcgctaccgtttctcctggtttggtcattctcccgcttctagctgtcttggccatcaccgctctcaaagacggttacgaggatatcaagcgtcatcaggccgatcacaaggtcaatcacaccatcgtccacgtactcaagggaggcgagggttacgacggtggcccgctctcgtttcactcgaacagcagtcttaccgaacccaaggctgggtaccacaattacaacgccatggctcacaaagacaagacgtttgtaccggcgatcccgttgcccaagggcaagaagagaaaggcaaagaaggcacaagaggaattggccacgacgaccgccatgagtgagggtatcgtccctgcgggtgacaaggattaccaagcggctcgaccctctggacttagttatgatgaaggcggtcccttttcggactcgaatggcgaaacccccaaggacgtcgtcaacagtccggcgtccgatccagactgttttgatgacctcaagacgttgggttggcagcagaccatctgggaggacgtcagggtcggagactatgtgaagatctacgacaacgaacccatcccagccgatattgtcttgtgttgcacctcggaggaggaagacgtctgtttcatcgagaccaagaacctggatggagagaccaacttgaaatctcgacacggtgttcccgaattgacccatttgcgcaccccggccgaactggagagggcgcgattccgtatcgatgcggaacccgccgatgtcaacatgtacaagctcaatggagccgtcgtgctctcggatgagaaccgacacgcgtcgagcgacaagcccttggttcacccgatcaccctcgagacgaccatcttgcgaggatgcgtcttgaagaacactggttggatcattggtgtcgttctatttaccggaaccgataccaagatcattttgaactcgggtggaacgccttctaagcgatccaaggtcgagaggcaaatgaaccctcaggtcttgctcaacttggccctgctcgctgccgtcgctgttgtctgttgcattgtcaactacaccaacgagaagcgatggaatgatcaacaagcctactgggagctgtttgccgatcaatcagacgacaaccccagcttcaacgccttgatcaccttcctcaacgccttcatcactttccagaacattgtcccgatctctctctacatctcgatcgaattcgtcaggaccgcccaggccgctttcatctactgggaccacgccatcaaatacgtcaagaacggagttactactcgaacgactgccaggtcatggaccctttccgacgatctcggtcagatcgactacgtcttttccgacaagactggtaccttgacccagaacgtcatggtctttaggcagtgttccatcggaggcaaggtgaatagtctggcggtggtttgatcactcggttcctcccagctcatcgtttcttctccaggtctacaccggtgatggcgagatccccgagaacacgatcgtcgatggcaaaggcagcatggagaaaagtgacgtcccgtcgtcgacctcttccgacacgccattggccaaaaagcacgattcggttcagacggacggcgacaaacccaaggttgccctgcccaaagaggttcttgctcctttccacgaccccgagctgctttccgacatgaacgataccgagaccgagcaatctcggttgttgcacggcttctttgctgtcctcggtctctgtcacaccgcgttggcggctgaagttgcacctggcgtcatcgagtataaagcacaatcacccgatgaggccgccttggtccaagctgccgccgacgtcggtttcatcttccgaggccgggaccgcaatatcatgaagctcagcacacctttctctgatacgcctgacgagtacgaacttttgcacgtcctcgagttcaactcggctaggaagcgtatgtcagtcattctgcgcaagcttgacgaggacaacaggctcttcttgttgtgcaagggagccgacaacgtcatctttgagcgcctcgcacccggcaacgacgagatcaagaagaagaccgacgccgacttgcaatactttgctggagagggtttgagaacgctttgtctcgcttacagggtactggacggtaagtgctggaacaaacactttaatctcgtcaagcctctccactgaccataatatcaatgccagagggagtctatgaagaatggcaaaagcagttccacgaggccagcgttgcactgcaggaccgtgaagatcgtatcgaaaccgtttcagctgcgatcgaacgggacctcgtcctgctcggagccactgccatcgaggacaaattgcaagatggtgtacccgagaccattgccgatttgaagcgagctggaatcaaggtctgggttgccaccggagacaagctggaaaccgcggtcgctatcggctataccaccaatctactcaccaaggacagtaatctgatcatcgtgcgcgaaggccgaaccgaagtctacgatcagctcaagaacgcgattgaagggttcttcggcgaagacgtacgcgagatggatagttctggcaaccttcaacctatcaacgatagtgtgggaggacacgaactccggcgactcgataccggtgtcacctctcttgtcggtcgggacaacggaactcgacctggaggtcattctctcgttatcgacggaggggctctgcgtcatgtgagcgttgcttcttcgtcttcccttgcatttctttgttgaccttgttcacttctacaggctttcgcagatgctgcgaccgaagagttgcttctgcatctctccacccagtgcaacacagtcatttgctgccgtgtttcccccttgcagaaagcccagattgttcgcttgatcaaggacaaccttggagtgatgtgtcttgctatcggagacggcgccaacgatgtcagtatgatccaggctgcggatatcggagtcggtatatcgggagaagaaggtctgcaagcggtcaactcgtccgactacgccattgcgcaggtaagcattcctcgtatcgcgagacattcgctgcggcgctgacacggataggccttcctactgcagttccgatatctcaagcgtcttcttttcgttcatggccactggtcttacttgcgaaactcgaacatgattttgtaggtccattacgtctggtgggctggctatcgattggggactcatatggcaagcgattttctccaggaacttcttctataagaatgttatgggtgtaggagtcctgttctggttccagttctactgtggatggagtactacctagtaagccgagcgatgacctgtctacatgtggcccgtctgattccatgtcttaccctctaaaactagcgtattcgagtacacctacttgctgttctggaacattttctggacgctgttgccagtcatcgctctgggactcttcgaccgcgatatcggttagttccgtgtatacctgatctagtgaccttttagctcaagctcttatcgtccatagatgccgacagcttgatggctctacctgaattgtacaaggtcgcaaaagaaggccattggtttggactccgtcgctttggttatttcatgctacagggagtttatcaggtcggttgacgccatcgaaatctgaccccagaccgactgaggctgatagtctgttccccgacatagtccgccgtggtcttcttcttcatcaactacgcctacactaccacgaccggtcgaaccgacggatacaacccggggcagtacgagatgtctaccgtgagtggccttcctgtttgtacttacgagaattagcggctgacttaccctctttttcgcaggtcatggtcatcggtgccgttatggtctccaacgtcttcactggactgtacacggagtcatggaatgtctgggtctgggtcgctgttcttgtcggacccgttctgatctggctctacaccgtaggtgaagaatcaaagcgatcgttttacaagaagctaatcgatcctttttctgaatcataggcgatctattcggtcattcctcccaagacattcgcaacgtgagtgcaagacctgtgattgtgtatcccgccccctaggatgattgggctgaacccgatgaatccgcgacttgcagcaacgcctatggaaacgagtgagttgcaatctccaagtgtaggtcttgatcctacagcttacatatttctcctttagccattacatcttccgctcggccctgttctggtttggttggatcttcgtgttcctgctggctctcgcgcctcaatacatcgggcgatttgctaagaggacatatgcgccgaccgatatcgacatcatcaacaacatcaagtgagttggctcttttgagaaggtgatcgcttatttgacactaagagaaccttcttaggaaataccaccctaatattgacatcgctaagcaccctcaattgggtggacgacctgaagtcaacaccggtgctcaagagccaccagcgtcgaggccctcaatgtcccgtggtgtttccgagagcaacaatggattgcgacactttggtggcgcggccgaccgcgatgagctgccggagatgacagggcgaccctcctactcggagagtcgaagagatgccctcggccgcatgcaaccgtcgtcgctgcgaggttcggaagtggacagtgagtccacattcgaaagagctgtgaattcaaacatgctcaactgttgctcttttcagtgtctaacggtcttcgacgcacggaatcgcgtggattcgactttgacgtcgaggaacgatcgatcgctgttcgacgtcttaactcgcgcttatcgcagttttcggcaataaggaagactcaatcccgcgaggccgaccgatcgaacgactcgccaacaaaggcgaggctgagagcagggagcatcggtgcaggctttagctcgcttcgaaaccgagcaggatcggtgctcaagcctaagaagggcttttatgaccagactcgtgcgatggagggagagcgaggacccgacgaagcgccttagacgaaattctcaacccagcgatacatcattatctaggcagatctcacgcccgtatatacacccattcgttctttagctagacacttttctaggtgatacctttgtacccggaaaacccaggcgcagccttcactctgtgcatcatagatttcctgtaaatgccggatcgaattcaaattatatatgctcttccaaccatggtatgccgtcttcgcatgcgattacagcatgagggcgcttagttacacgtcagattctcaagtggtctactgcgcgaaatcgtcaggattgatcgttgttgcctcgggttcaagatggggtatgtggttgttatacaagaacaaacctttcccattcaagtcgatcttggcgatggagaaagacgtgttatagcagtgctggtcttgtggactatcaaagccgaatccaaaagaacctcccttgtccagcggccaagtgagtacatccagcagacactgcgatgaagcgcatgaagtcagttgaatgatgcaggcgtgaagtcgctttcgaatcggcttacagagatgaaagctccatgggagacggctatgatatggatatccctatcggacatctttgatttcaaagttcctctcgaaatgatgcgagacgcccattcttcacatcgcttcatgaggctgcacgatattgcggacaggtcagcgagcaagtcaacgggcagagggcgcgagtgaaagacatactcctcgcgagtctccatgccgggaatctgtggccttggaggtcgaatggtcttctttgccttgggaatgtttgtctcgccaactcgtgccgtgtctttcgtactgcctttgaccgtggttccatcatgtttcggatctgctcgtctcagggcaggcaaagcgggcccgtggctggagtctctcccagcaggatctcgtgatgatgcttctccttcacctcggatttcgacctgacccatcataatgttgatatcttgatgccttgcttgttcatgagactttctattctccgcagaaggaagttgctgatgcgatactcgatcgactcgcccgggttttgctgtccgctccgcagatcggccttgacgctccggcttctcctcaagcttcaccggtcccaacgatccgtccgccttttcttccggggcatctaattcctgttcgggtccgccaaatctggtgccctccttcttcggcttatttttcttcggacgaacgaccttgtgattgttccacgcgcccatatctcgttcgatgagactctcatcaatggccaatttggcgtaaggttgcctgtgataaatcgccagcgcagtctggtaacggaggtcgagtcagcggcgcttgtgagaattatgtgaaagaatcttattcacatcccgagctcttttcaagggtgaagtcaggacgtaatcgaactccgcatttgtctccaaccaccttgacagtagttcggcttgttctcgaccctcttcgttcaggtccgtatcatagtggccctgaagaggcagctatcaaatcagcttctctggtacagaccaaggatcatttctctggctgacctgaatgataccatccacgttgtgttgagtcaggccatgcctagcgatccacaggtagagcatgccgacggagatctgggctgacggtgatcggtttcggtttcggtagtgcaggcacaatcgctataccgtagaagatcagagtcgatcgtcgcgaacgtattatacgctaacaacggtctagatggaataacaggccggttttgggtttacaaccgtgcggggatgatagacagtacagtagtactatcaggacgttgcaaacaaagactgccaggggtgtaggatttgacgatctgggccagatagttttcgtgacgtaatcatttctcggccgaacgaagagtttccgatcaccgaggtgaattgaaatcgcataaactttgaataaaaaacgcataaatccgtcatcgattaaagaccatcaccagctagagctatagaccgctagcaaagtcattcgatgttttgccaaacctgcactagggagaaagacactcagcaagcggtgcctcgcatagataggtcttcaacacagcatggatgagctgccttctgttctagtggctattctggacattcacccgttgtcatggagtcgcgaagcgcagctagctcaagccaaaccatccggcaagaccggtgaaagctcgaccgaggccgggttaccagactcggcttatttcctaagcatcgaccgtgctttggatcagctactggtcttcttcaattcacacttggctatgcgatgggggaacgagctagtcttgtttgtcgccatggcgaatggcaagtcgtaagttagacctatcatcacctcgtcactcgcgagaaaacgcagaagcctaaactatacctcgacttttagagagctactatattcctcacaagctccatctgtatcattacaacatgacttggacccgaattcctttgagccgttccattcgatgggcgagacgattagcagtcggctgcgccagcttctggtccagcagatggaaacatacgaagcagacgaggatgtgaatatggacgaggagaccaaaacaaagcttggtaagcttccggaacgccgattgtctcgaaccaaagtcccactgaaacaagatctcgttggctcacagacggtccggcaatcgttcctgccctgctccgagcactgtgtcgtaagtcatccccacgtgaccgaacataatccttgaactgatatgacaagcacagatatcaaccgaatacatccggtcgattcgcaaggtgttcaaaacatacaatcgtctacgaccggccactacgtgctggacgagcacgagacgaaagctcgagcgcggatcatggtcatcaataattctcacgatcggggaaatggcggatacgttggcctgatgaatgcggtgtttgcagcacagaagcgagtgagtttacattggagagcacggccaagatcgagtttgaatgctgaatgatgactgttcgatttgtcaccagaaaatcccgatggacgttctaaatctacacgcagaagactcaatcttcctccaacaggcctcgcatttgactcatgggatctactaccgagtgcggcggaaagatggtctactacaatatcttaacgtgagagcgaccatcaggctcctggcacgacttcgcagctgatctctcgacgcagctcatcttcctagcatctccagacacaaggaaacagctcggtctaccatctcaggacaaggtagacttcagggcggtatgtttttgccatcatcgggtggtagacgtgggcttcgtttgcagcgtctgtctaagtagtaagcccgcccgacgttgatggctcggttccatgttaaggaactgaagatccgtttgcggttttgacagtcttctgcgagccaagacccctctgcaacacttgcaagtgagtccgccgaacaagaacggagaagacctttgttggcgcaaatcgctgactctttcctcttcaaagatcgcgattcccgatgcagtcggttttgcagctgaagaagagcctacccgcagctctgattcagtccatcactgcatcaagacctaatcagaccgccgtgcctagccccctggccggatgagtctgaatgtccaaaaccgcacgcaatttggtatgtatcaattaatgccgttgtaatccgctgaatatgagcaaatcacgtgatgccttctgggaccaaatcagagcaacgggaccactcctttgtcccttgcatcacatgagctgctttgccttcactgctgacgtgctgacatatcccttcagcgaaccgggccggtctttgattcttgaaaagccatcaggaagctcgctctgtcagcatccatcgcagttctggcgagcaacactggcgcctcttcggcttctctatcttcgaagcgagcccctgtgccatatgttccctttcttatgcttcacgaatcctgccgagacacccgtatgatcacaagacgatacgcagagtcacgcacgactcctcgctgatcaggagattcgcgcacgcgggctctgcgtctccggcaatctcccatcctggtcctgaaaggagatgactatggtccgctcatcatcatgacgcatcacgctgcaccattcacgacggcaagcagaatgagcctattttaattaagcatgagggatcaatgggtgctatcacatggtcgaaccatatgtagtcaataaccgttcgatcctatcttcagtgaatctgcttatttttcggctgcgctgtatatcgtgtcatcatcccgccattcatggtattgttcggcccatttgatgtagcagatcgtcactgatgttcacacgatgaattgatggcaatgcatctcacatacctgccatgtcctagtcaattaaaggaccacagcattttagcggagtgacatgaaaggaacgtcgaagaagattcgcgcgtttcaagcacaaagcgcaagacaaaaggaaagaacgagccggacccttctcgtatccgtatataatgagagctctgtgtgcggtctttgctactgcgctcaaagggaacgcacttgctttgtatctcgcagtttaagacatccgcgacacactcatcccccttcgacgcgttgcaacgctcagtcaacgtcagcgccacattctagtcaaacgacagtattctctcactgatgctcagtgcagacagagccaatgagcgtcccgcgccgatcaggctgccaccgtcccgtcctcactcctctattaaccttatttcagacggaccaaacagcccagtcagaccccgctcagccacagtctcgccgtcaatcgttgcaaggaagaacaatcatgaagacaaggtcaggcatgaggcggacgaaagacgcccatcacttcctggcgctgcgcatcgtctacaaaccccttggcctaagaaagacgagattcgtttgccaagggctgaggtcgaggcccctcctcgcggatcgccgacggtggcagatctcctcgcgccccgagaaataggcgatatcccggccatcgaagcagaatctggagcgactggaaccgaagctccacgtcgtcataccgatacccctatcaggtctcttcccaaaagacaggagccggataggaggaagtcgatgactacagctgcgtccatatcttgcgcttattgcacggctacaggtgtcaactcgacgtggcgcagagaccgctcggggaagccgctgtgcgggcgatgctgcgaacagttgaggagacgaatgaaccctcgtcaggtgagctatcataaatcagaggcttgaaagtcgtgagagggactcaatgcggacgaggttttcacaggttccgatgacccgtccggcgcgacccgaacgcgctccccaacgccaagttgctgcgcagacagtgcgcgctcgatctccctcgcccggccccgacaggcgcgcccaggttgctcgaggacctggaactttgacaccacatccttatcgacggtctcttctgtacgaaggacaggacggtcggcgcagcagcatcgccgctttgccaccttaccggagtcccgccttgacttctgcttctctagagagaaagaaccgggagggttacgacggctatcaaggcgaacgggtgtcgctgcctccgcttgtcaacattgagcgtatggcagatgggtacgggccgagcaaagtaagccctactcgaagagcctctcgtcagtacgagcggaccgaggctccaaccgaagccgacatccgtgatcgccgcgcaatgctaatggaaggtaggagatggatattgggcatgttggacgacaccacggcaatgatcagagagctagacaatgcgacgttaggctcgtcaatcaataacaacaattatggggttggccctgttcactagcatgtacattagctgcacagctgtcgttctctacactgtaaatccgtttttgtacaactatggctatgacactgcctgttcattaatcgttcgtctagtttatcgccttccagcgagcttcgatagtaagctacctccggtaaaaagacccgtggatttcagatcgaccagcggctgttggggtttgcgttcgggaaccgaaggcgtcgtatgggcgaccggtgcatatgctgcagctggggtgttagccgcctgcatcattgcgcagctctgtaaaagtagtttcgagatcagtctccggtatcgtcaaattcgaccgaaaggaaccttaccttggccgtgaacaatgcttccataagctgaattcccggcgcagagtcgagtgagaaaacgtggaggtaatctccaggggactcgaacagcgtagccggttcacctacgtccattaatggggtcagcgccatttctcgaatgatggcctctagtcaaccaagacctacgtgatttgagaaccacgacaaacggtttcggtcccttgtagctgttcccgtgtaagatatagggatcgaatgctgaagaactgcacaaaaaatcgctttctttgccctgatcgcggaaggtatcaatcagtgtcatggccgagagatctaggctgcagatgtctcagacccacccggtcattcttggcgatgaacacgttcccgttccttagctcaatccaacgcttgctccatttccctcgtttcgtttcatgctggacgtagacgccgtgcataggatgtacccttggcatcatctgagccgcgtaatcaaaatcagtcagcagtactcgcggcaagagatggttgcaactcacgtcgaccctagtcaggcggtccagaggagattttttcgccaaaaacgcgtttcgctttagatcgccattccaacccttcatgatggtgaccaagctttcaaaacttctgactggacgttccatattgtgatattccccaaagatctcgaagaggatccagtcccccatgaaaccttgaccagtggtcgatccgagaacttgaacgagcacctctgcggcagtcgtgctcgttttcagctcgactagcctctgctcgccttgcatagactcgaggtaaaccgcttgacgcgacacgacagtctggtcgggacctggtgcaaccgtcgtcttgtcactggaagcttgacgctgtctaggtgaagcgacatgagaatctaccaagggggatgttggcaaggtcgggtgtgtagcgctggcctttctcgaggcgggtcgatccccaggttgtatcgatagcgaaggctttctcgaaaccatgtttgatgacgtgccggaagaggggggatgatctgagttggagcccgatcttagccggttggggcggcggatggatgagctccgcgaggcgagccattcctttcctgaagactcgccgtcgatgggttgatgtcctgatgcgaaggcttgcgggatccttggcatgggcggaatggctggagtctggcttctactggcgatatatgcagtagcggagaaacccgtactgtcgaataccgggctgttctcgactgaacgttggtattgcatgcgtgaggcagacctgctcacgctcgcatgtctcgagaggtccgattgtgtgctgctcgaagggactggtccggtgacatttctcgagctattttggtgagaaggagcaggaggccgaggaacgcggaggcttgtcgagcggtattgatggggggtatatgtgtcggaagtggcaggagatgagcctattctcggctccgtcaatgccaacagtttttgctccaaagctctcgccggtactccgccttctccttcccaattcggattgtcccgcccgttaattccggggcgtcgtctctccatgcgaggcgtcattaccgagttgccgggtcgtgaactgcgcttggcgcctcgtctcagcgttctctgcgccttcaaggcacctggaatgcgtttcgcaaggggaacgtcgtcgtcagagccagattcttcgctgttgtgcgaatgactaccgtttgagtcgtcgctctggtcgtcgtcggtatcatcgtcagagacgggcgaacccgcacgcaatggcggtcgccgcggagaacgagagccagaacgagacctcgaaggtccgccgcgaccttgacgctcgaccgagtcccgacctctatgcataccctgcgcagcccagtctcccgtcgtctcggtgggacgattgatcgaatcttgggatttggctgcagtcccggtgggagcggatcccgaagccccggtcgagttgacggtaggtgcggtacacccgttgatatcaacgacgtcgtggtaggtatccaagaaaccataatccatgctcaggtcagggtcctcattctgcgtgtcaggggtcgcatccgccgcgtccgtactatcgctgacgggtctatctccgggtacttcagctcgagtctcttcccagcttcggatatgttgaaagggttcgaaacccagttcgatcgcggaagatttgccactcgacaagtctaccaggcgcgggctaatcggttgttcgtgcgcgctcgatggcgggcacggcgaagccgtttcgagtgacacctcgcccggctgcaaatgtgccaaagggggcaacggtgggagattggcggtcggtggggcgctggccggtttgatggagtgcctggacgacctccaactactgcgcttggtctccctccctgaactgacgatcgacgtccctgccgatccttttccaatgacgacactgtgggtcttgtctggcgtggcgacttcgatcggtcttgcactgcctagagaagcgagaatgtccccaaaggagaacgcatcgataggccgttcgagtcgaggactgtacggcatctcttcctcgtcgctctcgcctggtggactgatccccaactcggcgtataggtcggtgaaggatccggtgctagcaggcaaggcggtcgtgccaagttgttgcgtggcatgcgccgcttcaccgttgtcgttcctcttggccgattgggtactggcaagcacgttaccatgttcgtcgctcaacgacaacgggactgcaggtcgattgccacacaacgattgactcgatggcagggtgatcgtcaaggccggtctggccttgattctctgtacgggcaaaggcaagacctgttgctgcgggactgccgtcaccatgacgtctgtcggtatccggacctctccatctaggctgtcgacgctaggcatttccgggatcgtccccttgacgctatcatctgacggcttgacaggcacgtctttgcgtttcaaggttcctctcaaccaactcatactgcttcgtttctgtacgaccttgtcctcatcttcatcgtcgcccccgcccagcttggcggccgagcgtcggtatctcagtgtcgccgagggacccggggatggtgacttcgagcctctttcttgaagatcccgtttctgcagccctgcattcagtccatgatcgtgcggaccaaagagccctcccgcagcagccctgaggtccctgaaactcctcgcaccgctcaacctcgccttggatggctttttcccgatcgacttgggttcgcccgccccgaacccaaagacgctgtatctgctactcggtcccgccgattccgagccacaagcatatcgatcttgtgttcccgcctggacgagctgctgcggggtttccctcaaaaagcccaattcggtgaaattgaacatgtccgccgtcgggctcgtcaggtcgaaggggtccacctcgaccctgacgtccccctcgatgttcattggtgtggccgctggagtagggaaccgactgctccacccgctcgtcgacgaggaagccgaggtgtaggtcatggccgagggagctgccgaccccgatcgagagcgatcatggggctgaagcacgagttcgtcgccgagggagattcgatgagggtgagcgttgggttggtgcatggtatgataaacgccttgagatgtccctggtcgtggttccagcgtatccctcgccgtcgacgagaccgcattatgcgggacggggaccgtcgagctcttgtaacctcccgtcggagcgataggcaagggtggcggaagcgatccctttgaaacatccctctttgcgtccgccttgaggttatgactactcctcgacctcaacctgttgacgaacccgccccacccttgtatcgagccggcctcggtcgtcgaatctcgaggtccagtagcagcccgcaagttccatgccgatcgaggtttcttcaacttgttcggcatggccgccgccgtcgtcgtcgtcatcatcgctgcggctgtcgatctggccatcatcgtctgttccaaagtctcgcgtcgtggaaaggtagggcgtatctgtccttgtctgtccatggaagatgaccctgcgttgggaggagggctagcagaggcgaggtatgacgagaggtcgatcggtctggtcggagggttttgcccagcgccaggagaaccgatagggctctacgttcgggcagacgacgcgatacgtacgaaatcggacattgatgcgaaaagtgaacgttgccatcagccttctcgtgcccgatgcgtacgaccgtgctacgccgtctagaacccggaccagtcttggggactcaccgaagggttactcctcgccaaccagtccttcatttctagcatgacatccttcccgatagacacgtccacctggctcgtctccctttccccagccggatcgagcagactgtactgggcgaccccggtatcgatgatcaacccctttttatcgaccccgttcatcgtcgtcatgttatcttgttcttcgaattgtatttgggtatgaagagccgaatccgtatcgtctaggcgtgtggtggattccctcacgactctggcccttgataaagtctctcttctgcttcggtctggcgcgatctagtttcgaattccgtcctcctgggtatcgccaacgctcatgttcgtcaaggccgggtaatcaggaatcctctgacctcgcttgcgctgggtgactgctcgtatgaatagatacagatacagtgagtgcagattgatgagtggatggtccggttgttgtttgttgtcgtcctcgaaccgctccctagctctagtctcttctgatcggtgaaatgtgtcccgcggggtttgtttacaaagtggatcgagggggaacgggcgtgtcgttttttcctcctttcccgctgttctttatccacgacctcgatcgagctgggatggattataacgatggagagtcgagatcggtatggttgatgtgggcaaagggatgttggttggggaaggatggcctcgaacgtgagcccggatcgtggatcgtccaaaggagtttcgcgaggttgtttgcgaaaaagggtcttgtcttggtttgataatgagcgtgggggtgtgtcggtgaagcgaccgcgtgtagatggatttgttgagagaaaagagtgtagccggagagaaagaaacgaggtctgactgagaagagagcaggaatggttgtgaagtgaacgatgagggttgttgtcaagatgaccatgaccaccgatcgtgcttgaattgtttgtttgtgcttgctgtgtaggggattggcgtggactagcgcgggggacgagatgtgaataacgtaatattatcgtgataaaatgccgtacaatgacctaattagcacgcgcttttcacttccaatttcgtaaaagcgcgatcatcctcaacccatcaagcgcctcgacacaaccctcaagctgctcgacctcacccaacttcaaggtcaccgtaaagcaaaagtcagacggggtcgacgattcttcctactgcttgtcatttcccccccttgtcatcgccccaacatcatgtcagctctagcttcgtcgtcgtcatcatctctgtccgtcatgcgatcattcacctcgacctcgaccttgctccggacgagtcgtcgagtagtcaaccggaacactaccgcttcctctagctcaagctccggctcgtcaatatcgaccaccaccaccaccaccaccaccatctcctccagatccgtctcgacccgctctcgtaccccacacgatccttcctcgagcgcctcggcccggatctacactcctcgtaaagaattcctgtacaagtcatacgtcgacctgctggacaagtcgcaagcggtcatcctctttcaacccaacaacttgtcctctgcggaattgggcaagatcaggcgagcgatcaagggagtccccgtgaccaaaggaatgctggggcaggatgacgatcaaggcgcaggatcggatgcgacgtccccagcatcagcagcatcagaagccaactcaacagcagctgccgcgacgtttaccatcgcacggaccggtctcttggcctcggtcatccgttccctccctgccgaatccacgccgacgtccacatcctctcaactcgcttccctcctctccggccccgtcgccctgttgaccgtgccgtcgctctccccaccttacctcaaatccctctttacgagcatgaataaatcactcgggtatcgtcctccccctcaaacgcccgctagtaccgccgcagggacgcacgccacctcgccacgactcgtcctcctcggggcgctcttggagaaagatcgactgtactcggcccccgaggtcgtacatctcgtccagacgttacccgagttggaccaactgcgcgctcagctcgtagggttgctcgagatgccggcgaggcagttgatcggggtcactcagcaggccggaggaggcgggttggtcaggacgttgatggggctcgaacaggggttgaaggaggggaccgacggggtcgaggaaaaggcagccgcgtgagatgccgcggggaggagatgatgtgtatgccatcacgcggaagggtcaccaagcgggaagccgtggacgtcgaggacatcgcagtgtcgttccgtcatgatcgctcttttgtcgacgcacaaagacaccccgggcgaatctggaatctgtatagagaacgtcaacagcatactatgggtgtaatcttaatacgaggcatatcaatcaagcatacgctatcaatgtcatggagactggacgcacgatcccgagagcgagattaggttttgatcgatattcggtccaagcggagacgttcaattgtttgtgattacaagttcgtacagactggtgagaagagggatacaaatagacgagcctgggcttgggtgtacacgggggtttccaagacaataacatgcgaaaacaaagtggggtcggcggtagtgccgatcaaggcttggcgattattggtgtcaagtgggatcccgggtggcagctacgccgaacgagcgacgaggcgagaaagggggcatcttcccgtagagccctttcctgagctatcctggccgcctggtaagtatcaggatccgaaataagccttcgagatacggtatcgagattcttgtgttcgtgagggtgataagagtcgagggccagtctgagtcgagctcggtcgcgttcacgagcgtcttcgagttcgacgatccacggtcccgtagttggtcaatgcctatatcgaaacatgagccggatgacgagcatagcgtatcagtagtcgagatcatctcgcagcgacgaatcaagactgaccatcctctcctctcgatcgtcctcgtcctcgacccgcccgcgcatgtactcgtccgagctcctcgacgggatcaagacggtctttttctgaccggaccattcgatcgtgagaacgttgtcgagcgctttacgacccatctagagcgaggcgtgcggtgggacaggcgaaggagcggtcagtgtcgacaagcctcgaggtgatggggagagggcaaggggagcttacgtcggtcttccagagcttgttgaacttttgtttgaggttgaccatcgatggcagcgcgatcagatatggggagtcgctagacactgctgggctgatattactctgtctacgattctgacgacaagaccgagctggtgactatgatgatgatgatcgaatgggtgtgcaagttgctgcttgaatgagctacgtagatgcttgggtgtttaccttttcgtgaccaaacgcgggtcaaagtagcgggaaaagatgacgattcgattcggtaggggaggtcaaagttgaaatgtcaagctatctcctcgtccaactcgtaccggcgcactttaccttgtcagaaccctctccatccacctcggcgtcagacaccatggctttcgctcagcaagtcagagcgttcgctccgctcggtcgtcgatcggccatcgtgaccctgcaggcgagtctcccgggccgcaactcgactgctacatgaagcatcctcggactcacccgacctgatattgtttaccccgcccacagctcttgacgacgcttcacctcatctcgacagactttctagagatccgaatgtgtgccgggttctctatgctccccaccttgtcgcatacgggcgatttcgtcctcatctccccgctcccgcttcgattccatatcaccgcggctcaactcaacgggacggctcgtccgaccacctctgaatggggaatccgacggggagacgtcgttatcgcgacatctcccacggacccgagcaagacggtgtgtaaacgtgtcctcgggatggaaggggacattgtcgaggtcgatccggcgcggacaaaggcgaaacgggaagccaaggagcagaggagcaagaacaccgagcctgacaagcggtgggaagagatcgacgccgatcatcggagagagatcaatagggccaatcaggtcaacgagcaagcgcttgtccccgtctttacgccgcggggcaagttggacagcgaacatgtccggataccaaaggggtacgtctggctggccggggataatctgagcaattcgacggattctagggcgtatggcccggtaccgctggccatgctcaagggcaaggtgttggccagggtgagcaggtcgtgatcatgcacgccagatgaagtctcgctgatttgcttttcccgcaggtctggcccagcccgaaatggatgtcgggcgataatctgatgcgggaagttgccgagacttcctgacgaatagcggtcgccaacccagaaacatgacccctctgcgtgcatcaggatcgtgaacctctagttgtatgccaaacccctcaccaacacatggctcagtgtcgcctatagcatagcatagcatagcatcgtcgtgatcgtgatcgtcgttacatcttgtccttcccgcgacatcgcacggctagatcctgatcagatcgaccctggctcgctcatacacctgatgctcttgctcgtcatctccacgttcggcagcggcgaccagctcggtcctcgtcatcgggtggatggccatcttgcaatacgttcctgccgacgatgccttggcgaggtaagatgggttgatcgtgacgaccgagtcgacgatctacagatcattgatcgaacaccaaatcatcgaattagcggcaagtcaccacgagagaggctgtccatctgaacgaggcccaccttggcaaagtgtttcagcttgctcggcaggatgagcacgtctggcgcgcgaagttcgaagcgcaacaattcctgatgcgtcacgtccaggttgacatccccagacaaatcggctggaggagggaatatggggtaaaagctgtatacgagaccgtgatttagccgtcatgcgccggcttgccaagaggaaacgaccgaacgacttacctccgctggttcagtacgtgtcggcagagttccgccatggcgtccttggcgcccactgcatcgggctctggctctgcttcttcggctcgacgaaagtattcctctttacgcaagtggaacagcacgtcgaccgtcgacatggagaacaagatttcgttgatgaaaaaggagcatgggttgggcaagaatcggactcgctgggtgtgaatgccgggcgcagtcatcagactttgcttgttcgcgctgctgacagactaccactagactcaccttgggtaaacccaattcggccatccgttccttttcgaggttggcctgggggaacgccacgtgccggctgaccagatcccgtacgctagggatcatgatgatctgagtgcctgggcacgattctacgaaggaagatatccgatccccaatctgttcgcggaaaatctcaacgggccgcttgtccacgtcaccggccttgatcttgggatgagccgaatcgacaaagggtccaagctgcgacgagcgacggcgttgatcagtctgtgtcttatggtcgcgattcctagttctgaatcctaccaagatcaaagcgtccggtcgatcgtcccggacgacctccatcagggcatccaacggctcgtaatcgagatccgtatcgagggtaaacggtcctgcggcgatgatgatggagaggggctgaccctgcagctgggtgtgctgaaactgcgccagctgggacggtcgcgtcacggccagttcgctcgggtgcggctgtcgatggatgtcgaaaagagaggtcttaggaccaacgccacgtgagggcgctcgaaatcgacgagatgcgactgaccatcaagacctcgtccacgacgaaagcgcctccacctccattcttgcccttgagcgcgacgatcccaccctgaaacacgccaaaccccttgacccctggtgtccccccgcggaccttgacgtcgttgctgaaaagcagcggcgtccgtttccccgcgcccatcgatcgcgaggattcgatctgcaacgaattggccgtcggtctccccgagtcagtcggtgtcgagatgagacgtccgactacgtggacagattcctgcgacaacggtatatgttgggatgggattagatgtgcggttcgagcaacaggagacgaacggcgctcgatgactcgcctcggagatgacggcgggatcgccgaggtcttctatccggtacgtcgcccggaacgtgtctgcgtaatcctcgatcacctcgtccagtgctgtagcgcgggagcgagcacgggttagagcgtggttatcgtggtcagcccaggcgatccagctatgtgccgaacagccagacaaggcttacctgcactacgatccgtcatcttttcaaacatgtaccgatctaccctccccccccgggacgcgcgacgaatcagcatctttgtaccccgattggcccggcatcatccccgctctccaaggaccccccactctctgggaccgacccttgacctggactcacaatcataatcctcgatcctcctcgtcccgctcatcttgacccgccccttgtgaccggtgaaatccaacgggatcccgctcgccgggtccaagtgcgagttgagcgtctcgagacgttccgagggggagggacggtgggcaaagacgactttacgcggggtgaagctgttcgtccaagtgagcgagtggtccatcgggtcgggcggattcagtgctcggatctcgggcatttgggattacggaaagacgctcgactcactcggctccgggtgagctgaaagccgggtctacaccgggcgtacccatcccatcaccactggcagataacaacccgttcgaacccaacggggccatgctcgatcgcgagggcgtggtaaacgagttcgagggggtcggtctggcgtgcagagtttttgcttgtgtaggtgtaggcgtgagactcgatgtcggggtcgacgtggggttgaatcgaggtggaggcagacgggaggttggggttagggtctgggtgggagtcggcttgaccgagctagagggtcgggaaggcgtggtcaaggcgtccaaactgcgagttccagattcagtatcgtaacatttcgagctgacacgacgtgccgaatggctccccctggaaccgagacttacaatcctccgatatccccagccccagacctcttgacccctgccttgttccccggagttccgttcgctcctactcctcctgccgaagctcccgctccccctgatcctacgcctaccccgtgcatccccgtctttcccagctgttgttccctcatgacgacctttctcaactctctagcgatctcgatgtcgacgctccccggtggggttttctgcttggacgtcgaggacgggtgtgaagggtgagaagtcgggagggagaggaggtgtgcttcgtacttgtaaaagagctctgcagcgggaattgagtagatcttgcatattgacgagactagcgagtcgaggcaggtaaagagggggaagaggtcagccggtgctcgcaaaatgcgtgggccgcgaatcgggacttgcgttcgtccagtacgttacgttgattctggagtgccggtccaaaggcctcgatcaaggctgcggggatatctctgtcggccatgttgatggagaagccttcgaggtttggtgatggttcctgatcaaacagagtgtctcgagaggtcaagggatgtagacaatcataatcatgttcccagtgctcccaatcaatccacctctcctacctgatcgacctggcctctatcaaacgcgtactcgagagagaaatgaaatgaacaaacgcgtagacacgcgtcagaaaacacaaggcgacgcggattgcgttgggtaaatagcttccgataacgtcatttaccgcccccccttttactgccgtaattcatcacgttgtcatctttccggaagcttctttaaaccacaagacaagatgaggatgagatggtggcctattgacatttcaattcatatgttcacgcacatacatgcacctacctgacacccatcgccctgtcaatcagcaccacgcccgcacgcactctcggataggagcctcgctgcgatgaagttccacatcgcccgcttaccggcgttgacggccatcctcctctcgctcacgtcggtcatcgcggacacctcatcgtcgtcgtcgtcgtcctcctcatcgtccgtacgcgagttcaagcttcagggagacgccttgctggccaagggagaatacttgggggctagtcgagcctactcgagtgctatcggttagtcgtcacaagtcacatcatcatagatctccgtcgatgcctggagctcatcgtccacccatatattctccctttgatgcgtccgacggactcctccgaccacgccttgcagacctcgacccgacatccttcaacctgcactacctccgagcgaccacctacctctctcaaggccgtcatcaacccgccctggcggatttctcccggctcttgcagctgaaacccgattttcaccaggctcatttgcaacgcgcgaggatcctggccaaggagggcgaatttgtggaagctcagcgtgagctggggaaatggttgaagagcgacaaggggaaagaggatgtagaggctagggagttggtaagtgtcgtccgcgcccgagcgatgaggtatgagcgtcatgtacagcggctgatctcgtcgccctccggctcatctttgctccacgtggaacctcgtcgacttgttctccgacccgacccgaccactctaccaggccacacggctcaccgaggccctacgagccgaatcgatcgccctcaaggctcactcgatgggagactggccgaccgtcgtggacgcctgctcgaccgccctcctcgtcggacccaataccgtccccctacgtcaactccgactagaagcgtacgaacacctcgtcgatggggaaggatacgtcggtgacctgtcccgtctgaccacccttcaaccgagttcgacgacgtattccctccgattagcgtattacagtcatctcgtccagaacgacccggggagagcggccgggtacatcaaacaggcgttgcattacgatccggactcggcaccccatcgcaaggtacacaagttggtcaggtcggtggaaaagcaggtagcacaggcgaggaatttcgtcgaaggtagcaggtaccgcgaagccctcaagatcttgatcggagatgccaccggcgcgtcgtcgacgtcgacatctacgaaagggctcgtccaactcgtcaaggatgccataacgaccgcgaccccgatgttcatccctagctctttcaccccgcattccaactcgttgctcctcctcgagctgtaccgcctgaccctaaaatcctatctcggactggatcgttccaatccggacgagttggaaaagtatgccgacctggtgctcggtatgcccgctggagagggtgacctcgacgcgctcgtcgccaagggggaagtgttcaacaagaaggaaatgtgggaagaagccgtcagggcgttcaacgaggcgtttgaaaagggtggcaggagtagtcgggatgtgagtcttgccgacggcacaaacgaaatgtcaccacgaggcgggccccgtgactcatctcgacgaactcgttctagatcatgggcaggttgcagatcgcacagaagagactgaaacagtcgaaagccaaggattattacaaggttagccggacggtgtttactgcttatggtctcttgggtcgtcatgtgctgacgattgcgctcccgtttgctcaaacgataccaattgggtaggtcttgggggtatcgagggacgcggatttgaagacgatcaaaaaggccttgtgagtcgatcgtcagcgcaatttagcaagactgtgcagcggctgatcgagagtttctggcccttgcctgatttacgcgcgcgagatagccggaaaaaggccaaggagaatcatccggatatcggcgggtccgaggaaaagatggctcagatcaacgaggcttacgagacgctcagcagtccaggtgggttccgcggcagttgaacatggtagcagcgttggccgctgacgctgtgattatgcatcccctcgttcgtccccgtgaccagaactgcgggagaggttcgacaatggggatgatccgaacgaccccatggccggagcaggcggcggtggcggggggcacccgttccatggcaacccgttcgggggcggtggcggccgacaattccacttccagcagggttttcctggaggtggagggaggacgcagtttcactggggatgagcagagacgaaagggttgtacatatggctcgaacacggtggcgaaggaacatagatgtgtggaccgtcttgatttattgttcaaatttggcgcgtagaagtatgcggtgcggtgcccggaaaccctttcttttgttttgggccgggcggtctctcgtatgagcaaccgacgacagacaatccgccgcttcgcaactgtcgtgactcttcgctgtcgatttagaaagaaggcctcttcatttagacttgataaacagatcgagcgggcgggccgatgaagaccagctaccgcgcgatggaaagaccgattatggtatgggcgagctcgagggtgatatggctatcgtcatgggtgtcgtcgcgcgcctcagaacagagatccgaaagttagcctcgcagcagcagaggcgattcggtgacgaggggcgcatggttcattggatgatagccgtcaacttctctcgagcggttgtcaaggctagagtcataggggtcgaccaggcgtgcgcgaatgaggaggccacatggtcccacagccaggtgctatggttccatggagacggtggcagaaccactatgatcgagcttcgatgagaaatccctgtagatctcaggcgatctcactgaagacgacgcgttggctctcaggggtgatcaacaaagggtcaagcccccgagatacaacgccactccgagtattcatcagtctctcaggggtttggcgtaggagagcgattcatctggcgagagaatcgcaagaatgaagcggttggtgaaggatccgttgagaacggatatcacgggcgtcatgatgtacactcacaggatgggacagcgacctttctgacgaagcgtcccgggtcacttgagaatcggctgggtcaaccgaaaagtctctttcggatgtcacgcttccaaccgccgccgatgtccatgcttctcatgtcccaactgccgacatccatgctttccatgctcctccccatcgagaacacattgacgagaacatactggccacggtgtgggctccctgctgcaagacctcgttcccttcgaccttccatcggacagcttttctggcggcgggcatggggagcgggtggaaaggctggcagaccgatacgacgcgggtacatatggcggggcaatgctccgtccacaatgcacgggacgggctcattgacacgaaagtcaccgggcttgatgttttgtgagaaatatcgactactgaaacctgtggtcaggaggaggacgcctctgctgcagacgcacaaccaactgcgtcggtacatacaatcccaaggtccacgagatcttgaaccgtttgccatgcctgtacccgcgccgttcgtcgtcgacaggcaaacgaagccgtcacatctatcgtctgctcgatctacgccattgtacgactgtaccagagagtatcaagctgcacatccgatccgagtcaatctctcgtccttccgaccccaccagaccgtaggcgcccccccctccgcctcttctgagaggcagatgaaacgcgaccctctggctacaactatacgagcgatcgatgtggaagacgcgtgagaaacacctttacgtcgcgggatcaatttccacccatgggctgccggacggaaaattaaattcacgccgcgatccgcgcggcggggcacgaaagaagagagttgtctgcatgactgctgcctgccagggccaaagtccaaggtgcggagagaagaggggcgttttcgtaaatgacatcgcggatttccgttcggtcgctttccctcgaaaagcctctttcttcatccatcgtctcctcgatgcgccacaccgaggcatgatgaccccggcgtgagtcgccgccagttcgcttgctgcacgggttgcgggtctacctgggtcgcctttcaagtttcgccttcctggcaacgcatgggaaggtcagacccgggacggttgtctattatccgagatttcgatctcaagcgttcgggcatgggaatcgatcgggaccgatacatcacagctgagcaatccgttatcaccgtgtcgactcgatcgtcgtcggacacctcgtgagaacgtctcagaccgaggacgaggaaaacaaaaaggtcgatagtactgtaaagacgtaaacaaaacggtggatctgctgaccccggcgtatgaaacgaaaaaaaaacgtcatgcgccatccagagtggatcgtcccgaatcatacgtacgatttcgacaagcaatgcaacaagggtgggtgagtctgatgatgtaatttaatcgacacgcgccggccggggcggatgggagggtgacgcaatgataaaagatatcccaccaaaaaagtcaacacgcgatccgcgagttgacggggatagctctcgctctgctctctggctatcgctattccttccgaagacacctcgcgggctgtcgagtcgcgagtcggaatcgcacagtcccccccccccctggccgccacctcgatcgcattaaaaaagattaacaaggagagacagcgaaaagcggcgagaggaacgagggaatcgtaccgggactgtaaatgccgttgcctgttcgtgatggttagagggaaacgagggatggcaaggtcatggtatcagaaacgccatgtcgtcgccccatgtctgatcagtctccgaggaccacgtctttgacgtcgtgggtcatgccggatcacgacaggtctgtctgagtagcagaagagtcatggtccctcgttaccacacgccctgtccatgtggttgtgtgtgtgtctgtgtgtgtggctctttgagctagtggaatttcgcgggagtcgtcgttgatgagccgtttcttcgaattcccgcgctatatcttgtctcttctctctcgctctcgctgcctcctcttcccattcagtccccgcgacgttcccttgccttgcccttcccctcgcctttgctcctttcgcctcctcatcccattcccatcccgtcccaaccctcgctcgactgactccactttcactttcgctttctctccgtccgtccgtctcctcctcctcttctccttgccctgcttctcccgacacttcgcctcgtccaacgacacattcgacccagttgaccctccctcacacagttcacaacctcaacaacgagggatcgacacaccacaccacctcacctcgtaacttgctgccattcacatcgacgccaaacgactctcgtcaacaatctacaccctcaaagaagaagcactctagcccgtgtgccaaccaataatcaaatctctaacaggaacctcgtcccggtcaccgataaagcttccttttcttaccggaaatcctacgtcacgatagtcgtcccatcctcgacattgacccgtttcggaaagaacaacgtttacaatcgataacaacaagtcaaagaagggagttgcactggtactctccatcctaggtcttatcacacctcacgcaggatcactcgacgacgaactgacaagaggaaacaccaacgggtacaagtcgggggagatactaccggccggacctctttagaagtttcccttttaccacctcgtcacgggaacacggagatatacctcatctcccagttcgacacacagtctctcttccagctcgacacaatcggcatccttgttatgcactgttgagcggatcataaaagtgacccccactatcgaaagcctgtcatcaaccttgatcttctgacgtcagctttcacccagacttttcaatcggtcctagttcctccagtcgaatagtcgcaaccgactagctgcttaccgaggaacatctccatacccctcgccgcgaatcgttcattccgacgcaccgagtctgacgaggcttctgagattacgacaatacgcctgtcataatcgcttcatctcgatctccacaaagtcgacaacccccatctgtccattctttccattctcgatacgacgcagacgactttcacaatgaactcgcaacaacagcaacaacaaggtcaggcgcaacaacccccacctccctcttcacagggacccccttcgcaggccgactcgccgttcgacctgtcatcctttatcgctttccccacagcaaattccatcggccacttgcccgctgggaacgacgatctctaccgctcgtttgcacaggggatcaagtcgacatcgaatggattgggaggagcgggtccgagcgggtccacgggcgggatggatggagggtaccaggctgccggagggtatcaacaacaggggcaaggtgctgggtcttcaggacgaccccagagttcgcacaccaaggcggcaggtggtaatgtagggaacggcgggcagggcaataatgccggtgggaacggtctgagtccgtacggtctggacccttctgcctttcacggcgaggtcaagtttcaggtgagtgtcggtcgtaatcgaatctcgtcccatttcgctatcgttagaccccttgactgattcgtgacggcttggaatcgcgtgtccgcagctaccggcctttttgaacccgaccaattctcgacctgcttacccgaacggtgccgaggcgtggtctggttacgggaacaactcgaccaaggcgctggaaggattgtacaaccagagcttcgcgggcgggtctaataatcgaccacagaatacaggaatgtcaagtaatgtcgggagcaccaacaacaacaacaacaacaatggaggtggaaatgggaacaataacggcaatgtggggtacggaaatcaaatgggcaattacgggcagaacaacgggcagcaggggagcaacaacctcggctggagtaatcctggtggcaaagtccaaggcatgggtggcggtgctgtcaccccaggtgcgcacatgaacatgggcgacgggcataatgacgctggtggatttgatcagtgggacaattggaattttgcgtatgtgtgaaagcgcgattaggtcgcttatagcgatcgctctgcaagtcctgactctgtagcatctcgttacacagcgtcgacggatcaaagccattcatgcccaacggcttcgggttcgattcgagcaacccgggaaacatcgtccagtcgccttataccatcaccaacgtgcaaaacatccagcgcaatacttcggggccgcagagcggcatgaccaacaatggatccaccaacaacaatcagcaacgaagtacgggcccgctcgatgttgccatgccgacctctgccctcctgccgaactcggcttatcccaactcgtcggcgttcgcatcaagctcgcgtatgagcttttgtcaggatgctatccgcgaccagcaaggcggcatgtcagggaacggcaattttcagggtcaagacgatggcaacgcgtttgcatcgtctgcgtcggataacatggcatccggtgcggcggcgtccctgatcgcctcgaacggcctggggagtcttgtcaatcctggcactctggccactcagaccccggcaggacccaacatgccagggctctactcgaccacaggatttgacattgtcagcgtactcgcaaaggtcgccaacaggaaagaccccaaaacggtcttgggccctgtcgactgtagctgtagtttcgtcgtttcggtaagtttgacagcgtgcccagtcgattcaacgactcttcgctcatccggctctttacgctcgatacaggacgtacgcaaattcgattcgcccatagtatacacatcaccgacattctctcagttgaccggttttgaagcgagagagatcttgggacgcaattgtcgattcttgcagagtcccgatggcgaggttgccaaggggtcaagacgaaagtataccgacaatgttgctgtcgctcatatgaaacgactgctgcaagcgggcaaagaatgtcaagcgagtttgatcaactatcgcaagggtggaacgccattgtgagccttacagcgttaccaggaagagactcggccctaaactgacatttcggtaaccacgcagcatcaatttggtgacagtggtgcccatcacatgggacagcgacgagattgtgtatcacgtcggcttccaggtcgatctcgtcgaacagcccaacgccattttgcgaaacatgcgagatggttcttaccaagtcaattatacggtgcaaaacaatcctcaaccacccatgaaacctgcagcaaaacctatcgttgaaccgccaccaccaacatcaatcggcatttctcgtcaaatgctcgctcttttgccccagaagactcaatcggcggtgctggcaggaggagaagaagtcgggaaatcggaatggcttcgcctggttcttgccaataccgatggtgggtctcgactttggacgatccgaacgcgaaactgtgacgactaacgcctctatccttcttctgcgcagactttgtccatgtcctgtcactcaagggacagttccagtacgtctcgccaagcgttacgcgagtgctagagtacgagcccgaggacctcttgaacaagcacatctcggacatttgccatccgtcggacatcgtgccagtcatgcgagagctgaaggatgcaacccacacaccctcggatggcagacaacctcaagcaatcaacatgctgttccgtgtgcgacgaaagctcagcggatacatctggctcgagagcagcggtcggctacaggtcgaatctggcaagggtcgaaaggcgatggtcttgaccggccgtgatcgtgcgatacccgccttttgctggaaagcgctcgacgaccatggcggcttgagtgacagcgaagtctgggtcaaggtgtcattggacggtctgttactatgggttacgggcagcatcggcgaagtctttggaggccgttcgaacgacctgattggaaagagcatctactcgttcatggcaggaggggaagatggcccccctgcacccgatggccattcgtcatcgctcgcagttgaaaaggcaatctcaacttcggccgagggcctgccaaagcgaggtgcaacttccgtacgacatcagctcatcggactcgacgggaggacgcgcgaagttacctccaatttcttcgcggcaggatcgtcatcagcgggtcccatcactcctccccgggaatctccccccgcttccgatgacgacttgcgaagcaacaatagctccatcatcgaggcgttgccgttccagatcctggtccagatcaaatcgacgcctacgggtattcagaaacccaaatctgccatcgttcatcctctgtccgaaaacgtatttgaagagatggacacgactcgaggcacatcgtggcaatacgaggtacatcaactcaagatagcgaaccgcaaactgaaagacgacattcaagcgcttcgaactggaaacaaggtcgcaaggagttctgatgcagaagacgatatcaagcgtgccaagggcaagaagcgcaaagcaaatgaaaacggtccgcaaccgacgaccgatcacccaacaccgctccaccagcagacccctggctttggtctagcaccgggccagcttttcaagacgtggtcgtagagctctcccaaacagggcactatctacaaaaaacaaaatctcctcagagcaaaatcaaccttgtatcagtttaccaacgggagcggtcgaatgactattgtcgaaatcgagttgtagcatgtatcagaaagttgattataaatcgtgtctctgctgtcaactgtggttacagggattgtcattgtcgagcgttgggtatgggtttgcggagcacaagaatggaacaatgtgccattatcgaaaacggcagtgggagctgatcatcgcagccgctatcctccccaaatacgtacgccatggtaagcggcgaggtccaagggatagtgatcctcatctaggttgccgaagaaatgggcgtgcggcatgccccccagtttctctgcgacggcatgcaccagctgtcaagatagagtttcgtcaaccgactgtacacacccgactcgttcgtacatcgaagacgagcacctacctcgggtccaaaggtcgagagatttcttactagaacaaggtccgtggtgatatctgggaatgcttcatccacccactgcattggccaaaccgagatgctgtggaatcagcaataatgttcagagcggccagaatccgctgatactcaccttggcattggcttccagctcgaacgggatcgtatttaccgacgtataagcatgtatgaatactagacgggaagtggcttcgttctgtctgacatagagttcggctcgaaccatcgtggcgatctgcatcacaagcgaggcttagacgggcagtaaacagatagcacgactgggcgtcgtccgacctacatcgtcggtcttgatcctgaagcagatcggcggtcaatgcgacgaaggtgattgtttatggaatgcgtcagattgagaactcaccatatacatacagcgtgcttattcagctctttgatgcgccggataaagaattgctcgccagtcttattccacttgcgcgcgatcctcgcgttgtcgtaaaggtataggatccagcgatatatcctcggttgattttggtatatcgtcagaaggctcatcatgacgacgagggtaacaccccatagcagcaggatgatgggtgtctgcacgagatttccgatgatgcacattgcgatcactgcaagtgccaaaatgaccaggctcgctgaagtgcgcttgctgcgcatgagtgcgtctcggttgatctttaacatcaaggctgcgaaaacaaactgataaggatagaatgcgtaagcaagctgtaggacagatcggattatgatgacctactgtaaagagaacagacatctaaaaccaacgtgttaagcaatgttgtgccagtcttatctcggtcaggcggctcacaaaactcatggagaagacgttgctcgactgagcgagtgagaaccccgagctggcatagataatcacggcgaggcccaggtacagagtacaggctgcccagagcgcaccgttgggtagagcacgaaggaagaatgacggcaaccctcggtccctgtctcggaatcagcgtgagggtgctgcagcattaaggatgaaacaagccagactcactgcgccaatcgctcgacgagtccacacgtcgtgactgcgccggtctagacgtcggccaaatcagctcaagcatagatacttggcgccagtacacaatcgactgaccaatacccctccacacagctgagaggggccgggatcgaaagtgagcgaggagcaataagatagtctaagagcaataagactcacgaccacagccgaatcaattacgatgatgattctaagccaagaacctgccgcgcgttgtccaaccaaggacaatacatttgcaccgctcatgatgctttctctcggcaagacggcataggtgagaagtagaacaggcagattgaccagcagggcgccaatgatgaggtttcgcaagaccttgggataggcatccggccggaccgaggagatatagctgcgcgaaacgaccggagatgggacgacgcgatcgtgtgcatatgcgctgatgaccactcacgcaggtgctgattcaaaaccggtaacccccagaagtcctatacagatcccattgaaaatcgatctcgggacggtgccgatcttcgcaggtacggtgttccagttttcagcgatgaccgcgttgccttccttcgcccagtgaacgatggccgcgataatgaggatgagcatggtcaggcagtgtaccgtgcagatggtcaaggtgacaccgctgctttcttttacgccgagcaggaaaagtccggtgaatgccgcgagaaggaggatagccaggacgaattctggaaacggcagccgggcttctccgccgatatactgatggtcaaaagaactctcagctcgactatatctcgcgccatcaccttggtcgagcggctcacagaggccgctgttgctgcagacacaatccccgttgcgaccctgacaaactccttgtctcagcaaagcaatcgagcttgccgaccgctcaataagcccttacgcatcaatgatcgtggccgttcccgccggtaacgcgatgaattttgtagtcgtgttcagcatgtaggtgtacttcacgggtcgagtgacaggaggatccggtgagcttcacgattcaagcgacaacggtgtcgaaagagaatcaatcgaaaaacaaagctactcacgctcgctccgtcaatccgcatggcgctgcccaattctaagagaatgggtttcaagaggaatagaatactgcaagccaccagcatacaaacaggcgaataaatgtcggcgaccgctgctattgctggcagcctgaagacttcgattctcgtcaatatccagcgtatatgtttttcggcacagagatacagacgaatagtagactgatccccataccgcattgccagcgatcgatgtggcccgatattgatcaagcttgggcttgttgtcgagggtatccaatttagctttagcttgctgtaggtcaaatggagtaagatctaggtaactcatactgttgtgatgtcagatcacctcgctctgcaaaccccatgcgtgcgaggacgtacgagccccatcctgcgaattgccagtcatagctcatgttcctgaacctgggtcgatgtgtgttcggcttcttggtcgtattcctgttccgcaatcttcttacgatctgtcaagtcaagtttcaggtcagcgacttgactatcgagacgggctccctagtcacttgccgtttcgaattccgatcgagcgaaacttggtggctcgtgttgttctaggtcgttatcggtcgtcttgcttgatcctaaagaggtgtttttgcgtgagccaacctcgagatgttatgacgggatgaacgtttgctcaccagcagcgttctttctccttcgaggtgtgatatatgtcatctcgatggcggtttcgtctgtctccctcaacttggaggcccccgactgatgatcagaagattcgtcgtcggtatcatcacccggcccaaagtgaggcatcgagaacgagaggtcgccctgtagaggatccgccatgtcttcggctccattttcgctgctgtgagactttctccgagatttgctgtacaaatcgacatctccccctctagttttggtgggtgtatcttgggctgggaatgagacgagccgttcccgttgcttctgcttggacggcgtttgcaccttcctagccggctccatagcgtgagaccggaattcgacggaccgaatctcacctgcgagactaaacgtcgtactggctcagatgctgctgatattgacggacgtgaggtcgatcctgagttcctgtcaagaatttctcgatcattcaaagatggagcccgagctgaatgaacttctagctggagagcgctagaacggaagcaatcttcggaagcattcaccggaagtatccgataagtaatcggaagcagatcatcggccgaactctctcgatacatggcaacttcgtcagatcaagatacgtcgagtcgatcacaatcaagtgtagcactactgaaggtcgatacaagtcctatctgatctgctcaaagcctgagactctcacgaaccatacaaaatgtccgaacaatccgagaaaggagcgtctctcgctctacccgcacctggagatgcttctaccgaatctcaacaacccgctacccagaccttgaacgtggtcgagggtaccaccattcagatggatgcacttggaccgatcatcggcaagtgtacatattgagactttatacgttcgatcattgacgtctatcatttccttgctcgtagtcaactcggacggaaccctctcacgtatctcgaattgggatgacatgactccggcagagcaggaaaggactatcaggctagttgcaaaacgcaggaaccaagaccgcatgaaggcattgaagaagaaagaagatgacgagcagagtgaaaagaatcaggctcaaaatggaatgaccggatctgaagcccaagcttagcgatgatgcgagggctcgacttttgacccatacaaaatatgaggcagtcgctcgctaccccgcggcccttatgtcagccgtccggaggatcgacaacatgatcggaggacgaataaggcctgtatagtggatacacaacatttatagatgcaatctacaccaatcgcaatggatgagtagcgtcacggaatctcacttgctatcgaccgcttgcgacccatgcgatgcccccgagaccgacgagaccaccgagtgctacccattctgcccaacctcttgttctcgtcatcccgagtagctcagtatctgtcgtcaatgtccttttggggttgcgaagcagatagccctgtcggatcaaaggcctatccctcgactttctcgaactttccacctcgacgtccgatctcacgtcatcacccacggttcctgtttgcgcgcccttgtatccggattctactcggtctgagccttccgctcgagacaccccaccgaagaagtcggtcacgagcacttcgttgagtggatcagggaaatagtccgtaaagacgcctggatgggacttgatcttgaccgggtcgtagtgatcgaactgcggaatggctcggtcaggctcaaatacccggctaggctaataagtcaaaagaagacatacgaaatccttcatggtcttgttgctaccaatatcgataccttccaggtattgcaaaacataatgagtgtaactgtcaatgaccgcaacgccgatgtcgtgatcgttgtggtgctgttcattaagaccaatgcgacaaactgtaagccttcaaacgaaatagtgctcccgacagatctcgaccgggctcacggaataagagttctccccgagctcgctggatccggttgctaaaacattggggctgtaaatcctcttgtacagagtatttgcctgacaagtatccgtcatgaagaaaagcttgttatatctggtttgtgaccggcggcgggcagttcagcgtgaatcccatcttacagatacttaacgcctcaccttcgcttctcccacatctgcccgatggcatccccaatgtcgtgcgcaccgacctcttcgttgtcctggaacttcataaactcatctcctccatgccccgccatgtagacgaatacgttagacgacgagtctgagagcagccttttcgaagcggggagtgaatcgggatatcgaccttttgcgccctcagaagaccatgatcagtttgctagtcccaccgcgttgatgtgtttctctcacctgtcaagaccctcagaaagctttccacgttgacttcgtaccctcggtaatcgacctcgacgccgactgcttcgtcgaccccggtctttttggcatcgacgccgctaccatataggtcgagctgtttgcccgagttggcatagatagtactagggaatccattcctcggattgcacgccacatcatcggcaagcatcaagattatgcgagaatctgggatacccaagcgttttactgtgcggtacctgagcggacgcgtccattgtcagagaggttggatacaagtccggagctgaaacgaatctcctcacattcctagcgtgttagccatgtgctatcgaccaaggtcagaaggtcaatactgtcgcaatgtcgtacattggtgcaaacatttacttaccctgtagttgaaccagtatcttgaagtgcagaccaacaccgcccaattgttggtgtgtcttccctctgcctcgtcctcgacggtatcattggtagaaccagaccattgctggaccctggccgcgctaccctctgatcgctgagctcctacgttgaaccacgtattccacagaaagccgcttctgagcatattcaacggcctaaagatggacgggatgcgcgccctagaagctgcaccggtttgctgagaagttggtgcagcagtagcagtaccagagggttggtttggcgtctcctcacacttatcgaatggacaagtcaggttggtagccaattgccggttggaaaacgctgaaggcgtagtgtacgtgacttggtccaggtctgtcgacggatcaagagcaaatgagtgacgaatcaccgtgtctttcatgcaacccagacttgccaaagtacggagcatctggtcctgacccttcattcacgaccctgacggaatgtcttccctctccgagcccaccggcaaagtagtgtaaacctccgagtttttcgcagcttttgctgtcgtcgccgccacacccgcttctcccgctgagtaccccttgcgttgaagatgcatcgtctacgtataccgaaaaggcgccgtgatcattcacctggtcaccgtagatgtagaatgcagagccggagaaattgaacgagaaagaatcgccgggggtggcggtgtagatggacgaaccgccccagaaaaggtcgacctggttggtcgtccaagttccattgtaggtgatctccggactattgtcgtcaagggtggtgttctgaagctgagccctggtggtagtaacgggagaacagaatcgatcagcagctgaattgtaaggccagacctgactgtctgaagaggaaactaacccctcggcaccgaattccagaccgcccactgtcacgagatccagcaggaatctgccaccctttgtctcgatcacggcctcgtgctccgcataagctaggctgtcggttccgtacaggaggtagcggtctgtcgcgttttgtaacgagtatcccgaaccattatagacgaagggggtcggtagcgatgggtcgatcgtcaaagtataattgccatattctggcccggagccgccccagacgtaacattcggtccctaatcgtttcgagagaagacgatatcagccttcaaaatagaccaaaccaagctgtgacgcttgtcgcgactgacccgtaaaattaaatgatatcttggtcccggcaacctctgtcgagtgatacgtcgcttgatgccatatggagcccgtaatgtcggacgtggcattgaaccagctcggattgtcctacatgagccgagattgttcgttattcatcatgagataccaagccgttgagtgtattttcgaaagaaagtggaactcacctgcgggttgggtgtcgaccagtctgccggattcgagtacacgattactggatcaaagtcgtcgaacgagacattgcggacggacatcgcaagagaaacagatgtaactcgagcagtgatctatgtgaaacgatgccgagcgtctagtgtactgatacggcagcctcggtgttgaaggtgctaaggtgatgaagttgcaagttatacaagtcgcaagttgagtgtgactgatcaacaactgatacatttcgtcagatttacttccggtagtcgccctctcgggtgattctcatttgcttccggaaccccggtcatcactgctcaagtacggatcgagtgaccgctatattaaacactatcattgactaactataccttgacggctgcaaggctctgtcatataccatgacaaggccagaaagctctccagtaggagattctgatgtagacttggaagcgcttctacgccgcttccaatcgcttaccaacacatctcaggcgagtctgcggatgcgggtcccccttgtaaaaacctggctcccactgatcgttttcgccatgcagctcgagaaggaagttgatgctgtgaacagggaagccgaaggatctttaggacctcgggcgtatgatgagggaaatagtgctgatgaaaacgacgatgatgatgaggacgaggatatatacgatatcggcgatgcggacgtgagtcgtcgctctccctttcacgttgctagaggcgtcctctgatgttcttcttcgaacctcctccgggccaggtagaagaatatctcgccagctttacacagagcaaagagacgactcctttcgccaagagagacgcacacgtaccgaagaacgaggctgcggtgacgaaacgagaagaagcagatccggagccgatagacgcagacttggaacgtgaagcggactctatcgttcgacaggcccaagacgaagccgcactggaacctccatctccacctcgatcaccgtcacaagaaatggatgcccctctgtctcgctcgaatgttgctccatccaggacgaccgcactcgaactcctttcctctctgtctacaccgagagacctgagatccccacccgatattgaggaggaaacggaagcccctctggaccctatctacgctcggttggcgggcctcaaacctggagcgtcccttccgggttcatctacacggttccctttgacgccatctgaaaccccaggccgcgtcgatgcgaaaaaggggaaacccttcgatgtccctgggatgcgtacagcgagggatgacgatatggacagttggtgctgtaagtcgactgtcttaggcgtcctagtgacgacgtttgacatttcctggggggacaggtatttgcaacgcggacgccacgctcatctgcctgacatgcgatggtgacccttattgccgggcatgttggtataacggacacgggaacgggcccggtcaggaaaagggacatcgggtgaagcagttcgtccatggttcggctggactcgctgttgggtaatatgtatttctctcgatcttatcggtcgtaaacaggattagctagtcgaaccctgacttggggatgacccgagcttgtacagtgtgtgtcaagcatggcagatgcataacggaccgacttaagacaggtgcacggacctcgtcggcctgatcgtctcgacgtgacatagtcgtcaacagcagcgatgagatatgcggcatatcctagcgaaagagaagcgggaaactgaaacctaaattatgctacaagtggtaagacggtgtcgagacggggctgatgagacgaggacgggctggcttgctggcgcggtttgcggtttgcggcttccaggctgttttgcttcttttgttgacgtgcgatcatcatactccgttgtcgacgcgtatgtaccggcgggacggacggagacaaggcgactaggcggatgccgagacttctcttcgcttgacgacggccttgttgagcttgtcgagcatgacgagggtggtctacgagttgggcggcggtgaaagaaagaaatcgatggaagaggggtgagcgaacatgaaccgcgtgcaaagcggcaatgactgcgggaagattagactctgactcacctcccacgagacgcagccgtcggtgatcgagacactatgaccggagcgaggaaacccatcagcactcgaacggatcgcaacttccgagcagggacccccctgttcggatgattgttgaccgaaatccggcttcaaagacgaaaccttgaattgaccagtcctaggtcgtgcggctgctagtgactgggatggtcagaagtatataaagcaaacaactctgatcacacactggacaaccggaatcctcggctctgtcctcacttccataccatcctgctacaacctataattgacctgcacacacacacacaatcaaccatggtcgttgcctctgccaccacccttcccgtccagaacaagacccactacgagagcaggttcgatcctctcaaagtgttgcaacaccccgacttcaaggtcctcgacgagaaagacctcgccgagttgaaacaaggggacgatagcgtcaacctggcctgtgcgtacaatgagaaacacgaggtccatatgatcaggaaacctcatgccgaggctggaccgggagaggtcaagctgcgcgtcagggctacggggatctgcgggtaagtcctgcacgagcctgtgggaggaatcacgttctgacgaccgcactctcttcctcatcttcatttcatcgctcggcatgaccggttgttttgtctgcgacgacgcccgtcggacgacagctcggacgttcatttctggaaacacggccagatcggacctaccatgatcgtcacggacgagtgtggtgcgggccacgagagcgcgggcgaggtcgtcgccgtcggcgagggcgtcaccagggtcaaggtcggtgatcgggtggccatcgaggcaggagtaccttgtagtcgggccgactgtggaccttgttcgtctggtcgttacaatgcctgtgagtagacgagagggtttcaggtcgggttcgatgtcgtctcgccaatttgactgacgggtcgactaactcgacgcgatgtaggtcccaacgtcgtcttcttctctaccccgccttaccacggtaccttgacgaggtaccacgtccaccccgccgaatgggtgcacaagctcccggacagcgtctcttacgaagaaggaagcatgtgtgaacccctcgccgtcgccctcgctgggatcgatagggccgggattaggctcggggatggggtcgtcatcgcgtgagcacacgtttctggtacagcagggacgctgcatacatgcacggactgaccacgaccacgacgacgacgatacctacagtggagccggtcctatcgggctcgtctcgctcctcgctgccaaagcgctcggagccaccccgatcatcatcactgacctcttccagtcccgtctcgatttcgcaaagacgctccacccggacgtccggaccgtcctcgtcgaacgtggtcggaccgccgaagaggtcgccctccagatcagggaggccgccgggggagaggatctcaagtttgcgctcgaatgtactggggtggagagctcgatcaggacgtgcatctttgtgagtgacgcctattccatctcgagcagggcgaagcggtggctcatccactgcatggcatcttggcagtcgatggcgttcggtggaaaggtctttgtgatcggtgtcggcaaggccgaacagaacgtgagcaccacattcatcacccgaccattctttcgaatcgcccgaactgacgcctacgctccctatgcagatccccttcatgatctgttctgccaacgagattgacattcaattccagtaccgatactgccaccaggtgtgtgctcctcctccccgatgttcgatgcatgcgaccgacctctcaactgacctcgcgtccctcgccgcgtctcacagtaccccaaggccatccgtctagtcgccgctgggctgatcgacctcaagcccttggtcagccacaggttccccctcgaaaaggctgtcgaggctttccacgtcgccgcggaccctactcagggggccatcaaggtgcagatcattgacgcctgagccgcgtcaaagcgagttcgagcggaatccaaagtttgaagattggcgtggaacggtccgtggtcaggagatcgtcgtggttgtaaggcattatcatcggttctcgacttgttctttcgcatgggtaatatcgcatcttttaacgagactttgaaagcgagaggaggtcgccggaagccgtcgtcacccagtgactgccgactgcgcacctgattgatctgtgtcggatgtcatcatgttgaaccgtgcactgtctcacaagcacgcttttgtcaaggccataactgatcggggaatccatatcagcgataaagaagcggtgtttcaacacccagatcacgcgatcgagtcgataatgcagcaatcgatcgccggccacaaggtcacagtcgagacgatgcacaacgtcgcacaatctcaattcgtttgtcattttcattcaatttctgtcttctttcaacatgatcgatctacaaaacccacgagtcccatcgatcccctttgcgatacctcttcaaccctcttcttcctcctcctcatcgggtcccaacccgtcttccctcgacgcatccaccgatcacaaccttcctcgatctcgatctcgcggtccgggtaccgtcgacgcgattcagagcttcttgggtacgatctcgatccaatagtgatccgggtcgaaaatgctagaaccgggcccgagcacgaacatgaatggtagcatcagtttttgctatagcttgtccgacgacggacccttcgctcgatcgacttccgggacctggagggtcggtcgggggggtcgaggggcttacaaggcgatatgtttcatcttgccctcttcgggtctcttcttgaattcgactcccatctctgtgaacctctcacagctcttctgcacatcgtccacgctgacggcgatatgtccgaacccgcgtttaccctcttcgttcccgttagtgtacccggggaaggaatcgtcggtctccgtaccccagttgtggcacagctcgagcacaccggggagggaggtgatctgggcttgtttctcctcgggagagaggttggcggtctcgggggaagggaaggcgaggaagtagttggtctgacgtgtgatgccgtgtcacaagggtcggcaattacggtacggtacgtcacagtacagacacgaaggatgcaagacgaaaatgtacggatgagcgaatgaccatccgatgagaacctggacgatccgtccatctcccatcgatgcgatacgatgcgatacgatactcacgaaatcaccgccgtctgatttcctgatcaactccattcccaagatctcggtgtagaatttcagggaagccttggggtccttgatcctcaacatggtgtggtctacacgcagacatacattacaaggagggcatgattagcgatcaaatcagatcgtgagtcgtcctccctgacaccctgacgaggtgtgagaggatgtcactacgctgctaggcagtactgactgaggacgaaagattcggttcctgcgactcgggacattttagtggtggtataagatcgtgcggtgtttcgaatgatgggaaatgcacggagcatgtaagttatgatgagtagagatgtggaatggcgagatggttcgacgatgatcgagttgcgagttgcgagttgcgagttgcgagttgcgagttgcgagatggtctatatatacgattgtagattgcatgtatatagccgcaaacaggagcgctcaacccggggacagcctgggcgagtggcggcgacttgtaaacgtcatcaaaagtcgatttcgcaggattatcagctattcgtcaatgacgtgtcatttaatcggaatgggtcaaccgacagtaggtgggtggctcgtcagactgaatcccgcattggagaatggcttttgagatggtgtacatctgcaatcatggtgagcattacaaggcaagaagcctgtcatgagagttgtcaatgacatggtcgatggccatcaactactactactagtagctagttatgaatggttgtgtttcccccaaatttacttccgaatttgattccgtcgaccttcaaagccgggacaaggaccaaaatcaaaaggtgagaatgtcatcgcctgcgaatggtccgaggtgaggggtcaaagtacagccacgacagagctatcacttcatcgaaatacgatcgagggaaaactcgaacctccctttgatcctgcgtggacatcccgggtccgactcttcatcgtagatatgccgcagcacgtatcatcctgagcgaacgggccgtgcacagtcagcaaaccccgtatcctcacgttctacctccggaatctccctcctcccatcatcgacttgttgcaccactctcggaacgaccctggacgaactacatttcattcaccacgcctgaacttcccggacttggagcccgacctcggcgtcgatcacgatgaagtctcccttcagatcgctacccaacctgctcctctgcggatccatcctcatcgcctcgtccctcctcctcgtacactttaccgcccgaccacactatgccgatttcgtacccgatttcatctctcggcctgtcaagaccgacccttatgaccagtccagcaaggacgccccggccgtcgacgtcgacgtccctgtcccgaaattaccggcagagtacgaacccttctacccttccctcgtcctccccgacgcgttgagggtccatccggagctctatcaacggctgtacgatttcctctcccgtcccgtgctcgaccacctcgaggcgatcacgatcaacgagcgggcatgcccaagagggttgagcgaccggttggtcaaccctgatcagctggagggggacggtgggttctggagggatgaggtcggtcctggggttatcaggcagaaaagggtcgacatggtgaatcacctggcagagctcgtcttgcgtggggagacggtgatttggagtaccaaggagatggatcaggaggagatggatgctatcgatgaaatcgaaaagggacgggaggatgaggaggtccgtgatgaggacgccgagcggaattcgatggacgatcagggtcgagcggaccatgttgccaagcgagtgaaacgcgaggtcaccgcgagggcgagggcgacggcgacgaccaaccgacatcaagtgcgacacgatcatcaacgaggattcgtcaccacgggtggtaacgccgataccacggcccgactgatcaccctcctccgtttcctgcgtcacgaatacggtatcaccctccccgtcgagatttggacgtttcccggtgaactcgctcgggactcgtctcaatactcggagattgtggaactcggcggtcaagtcctcgaagtcccctcgacgtacgggatcaacaaggacaatggcgcttggaagaatttccagatcaaggggttggccatcgccctgtcgagcttcaaggaactcgtctacctcgatagcgacaatattcctctccgcgatccgacttacctctttgatacgccctcgtacacggccgaggggagcggcaaggccgtcttctggcccgatttgagcaaggatcacgtggataacgccgtatggagggtcatgggcgtcccttgcgacctgaacgatttcactttcgagagcggacagatcgtcatcgacaaggtgagcgagacagtgcaggggagatgttcattgcggaagagtcagactcgaacgatcgctcgtttcgtcttgcaggccggctcgaacgggttgaacatggcagctctccatctcgcggcttatatgcaacacgaaaaggatttctggttcaggttgtgtggggtgagtcgggcttggcggtcgataccgacgatcgtgggtgtttccttaccttgtcctgctctcgtgttcgtcgtcttcagggagacaaggatacctttgtgagtccctggttttgtcggccggcaggacgtacgatcgctgacctctctgtcggcgtggtcctccagcgatgggctttcgtcgcactcgggcttcctttcacgagagcgtcccgatgggctacttgtctcggccagatgcataaaggtcgtttctgtggacagtacgtgcagcttgtttgccgctcctatagacacaccgtgacccacccgatccgcgttcctagtacaatcctacaatacgagctcgacccacccgcgggggaggcccgaccacgtcctctattcgcacactccaacttgctgaaacacatcagcggagttcatcagggagagacttttacccatatcgtgagtgcttggtctcgcatgacgtgcccgatcgaaatcgatactgatcgtcatgacgagcggcagaaacggatgagtatggatgattactctgaaccgacgctgaatcaggcccatatgtgggtttactgggtgagttttttgattgacaaatcgacagagcggtctcctccgaactatgagctgacgtgaaactggtgcgatcaaaggataatgctcgagggatgtgtaccgacctcgaattgcgagacgagggtgccggcttgaccgacgcggaaagggaaacgcaatccgtcctatcacgaaacatagacgagatggatggcaagccattgaatggcttcgaggacatgttcttcaagtacggtggacgagcgggaggatggcgaaaacgtgacaagtatcggataccgcgagccacattacaagacggaccgtcgacgagcgattaggtggcccggatactcgaattgaatgacgaccacgaacccgcgatagatgtgagaatccttttgtatcgatcgccagagacaagatttcgaccgtaatcgagtgtacatgacatatctcgattgacgtggtcgtgttttgagacgaaggtaccgttacatatccaagccagccgtgcggataaggacgcagttcaggccttcgcagtcgggacgaagcgctataatgcatgggaagcgtttctgaaaaaagaacggattggaattccggcgggactgtcaaaagtcggccattcgtcgagctgttagccacgatctagtcttgctgctttccgggtctgcgagagtcaagtcgaggaggtgaccagaagacctgggccttaggaacacagtatcgcacaactccgtagtctaagggatcgaggatttctgtgaaccgttgcgcccactgtctcgatgatgccttgtggtctgagtgggactagggccgttcacaattcgcagttgtgttcgacgactgtcgatccacttcttgaagccttcctttcaacgagattcactacccgcagcgaggatctggtccagtcagttctgggttgccaaccctcctgatggtcagaccggctagcaagccgcattagaaaagcgcacggcatgataagaacgaaaacttctccaacgcacgcctttcaaatcccgcaacaggccagcgagtcgcttaacaacctgccttacgatgaatctttcatgaagaacctaccgaagatctaaggatacacgagtcacaccgcattgtccgagcttgatccggttgccaaacttgtggccgaaatcatggcggattcggttgcggaaagagatgcggcaggtctgacgagggatcaagtccaagtgtccattttgcttctgctgagaaccgaacggttccgagaggaaccagatcgaaagacgatgcagcgaagttgaggtgaccaatattatatattttatgctcgcttttgcacaaccatcattcttgttctaggctcgatgcttcccgattcctgatctgatcagccaactgattcgactggtgatcgtgagaaacgctcccgtctgtgagacgacaacggatggtcagaactttccaacgacttcccgctgacagtccttcgttgccggcgtactcatgcggccaccagtctcgtgctctctcgatatgacgagcctcatgtctcacgaatagaagacctgaaagtcaggtgcggtcctctgagacggaagctttttctcagtgaaagcaaggtttcgcctgcgcgtgactcgatcgagaaggggagggagagggagggggaaggaagaggaggacaccatgctcgcttcgtcaaatcaaggtttcgtcgttcggtaccgtcctattcaggtggatccgttctcgaaggatagcgggatcagcgtacggattcgctgaatcagatcagatcagattcgattcgtttgacgactgactgacaacggacacgagttcaaagggatgcaaaaagcacagcacatgatcagaatgggtcggttgggctgaccagcacagcagttcgggttgacggaaaaagtacttcagctcgagctcattgttggatctttagcaacatactcgagtaacacgcctgaccactcgatttgattagaccaatcgcataaagataaacgttccgaccaaccgtttctcggaattcacttctgcacacctgccatctcatcgcctgtcacgtggaccgcctcgaacacgatgatgaccccgactaccgtcatgcttttcgtcctctcgatcctcgccgacgtcgctctcgccgcaaccaagaccaaggcaaagacgagcacccggaccggagtttccaagacgacggtcaccaagtacaagaagaaaaagggcaaggcagtcccgtggaaccaattgagcaagggcgcaaagattgccgtctacatcgtctgtgctatcgctggcttgatcctactcgtcgtcctcgttctggttctccgcaagtaagctctgagtgaactcgggttggatgttgtcccagctgacagggcatcacaattactggactgacaggaagctgagcaacaagcccctcaacgatgacaaggatcaagaagccgctacgtccagcgaggagactactccatacgagaaaccccagaatggggaaaacagctgggccattcctcctccgggtcaaggagaagcggcctcttactttcatcctactgtccagcccgtttcttacggggctccggcagtccctcctccttcgttctcgcctcaaacgcgggagagctgaacgaggatcttcggtgagcggtcgcacagctccgagcttgatcattctgctcgtaatcagctgctaaaccatcgctgtgacttctagctcgcccctgaatctccaaatatccacctcgacgttcaaaggaggggtcctttgactctttcgtcggatccggtgccgcgaatcccaaaggacctcccgtcgcccggacacgatactactctgttttattgttatacgtcctctcctttatgaacttctcttctcttccactcgccgttggccattcaccactcgatgttaatgattgtaacgccatagctctagctacattttaacgcctggaccagacatatcagataccagatcgagtacttgcctttacgtaaatcatagctgttcccaagcaaatcctctctgtcccgctcatcatgtaagaagctcgccatcgctcaaacttcgaatctctgatgacttctggacggtcgaccttgcgactgatctctcacgtctcctttcaacgactcacaggtcttcgttccccgtaccggtcatccccaatccacccacccccaaccctccgatctctgacccgttcgaagggctccgaggagggacgaacaccacatggagcgagatgtcacagggggcaaagatggccgtctacgtgttcgcgggtctttgcgcgctgatcactgcgtccatcacgctgtttgtgcttcaacggaatacttccgggtgagtctagatcagatctttcttggcgcagagacgactctgggtcaaacactgacgtgccccggttcagagactctgtggtccggaggatggtccgcaaggtcgggacgtgttgttttcgacccgtcaggaccgaccggattacgaccgtccagctcggaaccttgcgggatatagaacccggtactggaaatccgaacgcagggtctactcggccgggaaccgtttgtgtcgacactttgggacggccttctcccctcccgctgtcgagcacgaagcagtgaaccgaatcggaaccacaatctcaagcagtctgtacacgaataattcacaaagatggcggtggttgctcttctcaacttggggctggtagtagggatgacactcgcagtacgatcggtcttcacacgcaagggcaacactaggacaaaaccgggtttgagatcccgcatcgaaatgagcccccaaggcgcaaacaccaacgactctttcggtctgtgtcgaggtgcaaggtgtcttctcgacttcctgctcgactagcgctgcaccggtgaaatcgctcgacacccatacagaatcggagtttcaagtagggatccgctcttcacaaagcccagcgcacacgttcgaaactcgggcgctgaatgattgagggacgattagtccgttgcctgccagctgtatcacaagtgtttcgtcactcgctttgtcaggagcgtttcgtcaagactccaaagacggacgtatggctcacggtccaaaatgccgttcaattgcggcctgcaaagaggcttttcagagtagccctctcgcgaaaaaaaaagggacctccacatggtggaacggcctctcgtccgcgtataccgcgcctccacctctttcgatcgccgtcgggagctgttgtgacgtcgacagatcgagatatcttcaacgcttgacaaaccagacttttttgcgcaagcgaggcctgcttatcgatctttggaggccatgcggcgctctctgccggagctatgacgaatggccagataggaaacgtatataaatacaagcaggctcaggagcagttaaagaggctgggaacgataccagaaggctgtcgtcaaaacctcttcccaaaacatccaagccaccgaaataagcaatacttaacaacaaaacaatgtcttccactgattacaagttcgagggtgagtcgtccttcgccagggagaagagtgcgaaggccgttctgacgagccgtcttattggttcaacgcaggatggggtgctttcggtgccgactctgttgagggaaacttcaagaagttcgagtacgagcccaagccttgggaggagaccgatgtcgacagtgagcagaacggctggcaattcccatagcgaagaatggcatcctgatccttacgctctgacgctcagtcaagatcatgtactgtggtgtcgtgagtttctgcaatgcggccagagctgaggagaacagccaattgatcgggctggacttgttctcacatagtgcggttccgatctgcacactgcgagcagtggatggggtgcctctgactaccctcaggttgtcggtcacgagatcgccggtgtcgccgttcgagtcggatccaaggtctcgcacgtaaaggtcggcgacatcgtcggtgtcggtgctcagtgtgacagctgcaacgactgccacgagtgcaacaagcagaaggagaaccgatgcaccgccatggttgtgagctgttacgacatggtcaggctagttttcgaacgagacggctcacgctctcgatgtgaatttagggcacctacggtggaaagttcaagaaggagggtcccgctaaggacgccaagagttacggaggttacgcttcgtacaaccgatctcccggtcactttgtcgtcaagattcctgacggtctcgaccccgcctttgccgcccccatgctctgtgagttgcgtgtcacgttgcccatgacttgctgtcgcttacaacggcgaccaatcaggtggaggtgttactgtctacaaccctctcgtcaccaacggtgccggacccggcgtcgatgtcggagttatcggtattggtggactcggtcactttgccctcttgttcgccaaggctttgggggccaacgtcactgccatctcccactcggagcgaaagaaggacgacgccatgaagcttggtgcttccaacttcattgccacccactcgggcggtgacaaggactttgcgccccacgccaggtcgctcgacctgatcatctgtacgaccaacgacgacgagatgccgttgagcggctacttgtcgttgctccgacccgagggcaggctgattatggtcggtgcccctgagaagggaattcccaacatccagcccttccagctcatcatgaacaacatctccctcggcggatccatcatcgtgagtgtacgcgcaggactgtgtgacattctcgatgcttacattggtgatttcacagggatctccttctttgatctccgagatgctcgacctcgccgtcaagcacaagatcgagcctttcattcagaagcgcaagatggacgatgtcaacgaggtcattcccctcatgaacaagggtgacgtcaggtaccgatacgtccttgtcaacgaggagaacggcggaaagctatagaggaatccagtgataaagaagtgacaaacgctcaatcttgtaatagcaagcgcgcaaactcaatttgagggaatgtacccaaatgacgaacgtttcaagagacacgttgcctgcttgccgctgatccatgcgcgagcaaggtcgaaccttggtatgtgcggtagcgtggcgaacggtgtgtcttgattcctgcggctctcgtttgtcatggccaagtgttgggctcgaggtctcgattagaattggcgtaagagtctgaatggccttacgaagcgaactgcacgaggatggctgaggccgattccctcccggcgtctgcatacatttcggtcccgcgagcctctcgaggctagactaatacacagcacatgcttgctgcggtcggtcttcaggagcatcgacaagcacggcacaagccatgtcctcccttcatactcgatgactgggctgacgtctggtcattgcagacccagttatagcaggttcattctcatattcatttggcttggcgttgaaatacttagaagtacaaggtcgttggcgcagggtgtaacgttacatctccatgacccgctcaaggggtggatccatcgaggttgatgatgacggatttcgattcggtatagttctctgcaagatcgcgggggagaggaaacagctcgtcagtcattcgctcaagagctaaccacgacggacgctgtcaaaacttactgagtgcgtcttctccgagctctcgaccgattccggacgacttgtatccaccgaagggaacctgcgaaacgtacgacgacgaactagtcagcctctgtcgcgtagaccgcgcggccctttctcgcatctgctcacctctgcggtcaaggcgttgtacaagttgatccaaacggtacctaaaaaacgacgaggaagcgtcacgatcagtcactcgagcgattctcgagccggaccagcgagccggctaccgaaatggtcgaccccactcaccggcctcgatcttgttggcaacgttcaacgccttgttgatatcctgggtaaagacggccgaggccagaccaaactcggtatcgttggcagcctcgagcgcctcttcggtcgtcttgaacttgatgagtacgacgacgggtccgaaaatctcttcatgtccgatcttcatctctttaccgacgtttccaaagacggtcggttgaataaagaatccctcgtgtccgaacctgtctcccccggccaacaggtcggcgccgtcttctttacccgatttgatgtaacccatgatcctgtcgtactggatctgactgatctggggtccctggaaggtatcggcttcgaagggatcaccgaccttgagggtcttgatgtgctccaagaatcgcttcgtgaactcgtcgtaaatgccctcttgaacgaaaaccctgcgagagaagcgtatcgagcccgcctagcatgtcagccccagcgtgatctcgtgaaagcgacctctaaggacgctctcggactgacctggaccctgcacagcacgcctgaccgtggttcaaaaagataccgaaagcggcccacttgacggccttgtcgagatcacagtcgtcaaagatgatgttgggcgatttcccaccgagttcgagcgttacggccttgaggttggaagcggccgcggccttcatgacctgacgaccgacggcaccagaaccagtaaaggcgaccttgcggatcttggggtgttccgagatggcagctccgacggtaggtccgtatccattgacgatgttgacgacaccctgttcgaggggatcagacgtcacgtagggtccgtcagtatgatgcccgcactcgtctcgatatgtatcgttggtgtcaagcgagacgaatcgagactcacgtcggggaacccggcttctttgatcaggtcacacatcctcagggcggtgagcggggtgaattcactgggtttgaggatgatgacgtttccagtggccagtgcgggaccgatcttccaggagaacatcaacagagggaactgatgaacgatgccgtctcccggttagcacggtccctccccctcaacccgcatacgaccgcgttcgactcacgttccaggggataatctgtccgacgaccccgataggctcatgtcgtgtgaatgccatcttgcccggtccgatattgatgttcttgccgtgatccttgtcggcccatcctccgtagtatcgaatgacatgggcggcttccatgatatcgaaccctcgtgcgatctgttccaataccggagaaccgggaggaacatcaaagaagagacggggacgggcggttaggcatacgttctgatccctacaatccccggtcgaaatgactcaccgagtaagccttcccgttgtccagagtctcgagcgcggacaactcgtccgcattggcctcgatgagttcggcgagcttcatcatgagcttgcttcgctcgacgggagtgacccggtctaccgtcgtacgggtaggtggcttcgtcagtacgagacggcagatcgattaatggacgtgcaaggtcagacttaccaccccaagaggtcttgtaagccttttcggcggcttcgtaggccttgttcacatctaaacgtcaaataggtcgggaggttgtcaatcacaaagtctcgaggaagaggagatcgcctgagcaactcgagaggctccgaacaagggctcaccctctgcggttccctcggtgatctcggtgatcttctttcccgtggtagggttgataacatcgatggtcttgcctgcgacgacgtgtacgtattaaaacctagctcagtgaccccgaatgacatctcgcgtgttctctctgcgggacatgctcaccagatccctcgacccattgaccgccgatgaacaatttggtgttcacggtggtcttgccctggtaggcagaggtggggtggttctcggcaaagtcgtaagtgaaggacattgttgtgatgtggacgaggtttgtaggtgggtagtgttgcgatgaggttagtctcgctacttgtcagagggaagagggggcgcgttcgggggtctgatttgtcaccacgatgtcgagcgtggtagtggtatatatatatgccagatggagcaatggtggtgtgatggtcatgggtaggtgggctaggtggttgggttgacacctgccagcagatgtcgctactcctccttctcctcccccgcttccacctgaccaacctccccctcgttcatcgccggagaaagcgcggaatcaaatcatcgcctcgctccctcccgctgcccctgcgcctgccccgcctcccggttattaggcgaggtgccccatggcgcgctagagatgccgcgtgtacaccgcaatgacaaagttccgagaatcccgatcacgggcctcgccaggccagtgactgtcggtccgatgttgaaccattcggccgacggcccgaactcgtccgccaactccgagagcgcgaaacggcatacgtacacgtcgcctcgcgcctcgtctcgccatgacagtcgagccatgtgtcagtacttggtgagctagtaattacatggtataagggtgagagaaacactcgtacatctcagtcgatagaaaacgaatcgaaaagggcgtaacaggaacctggtgagaaccaccatcatcatcatggttgtcgaatcgatcgaaccacgtcttcaaaagtgacaggcttgggatgattctctgtgtcaaaacatcgatgtaatacccaccgtttcatatatcagccacttgtatcacgtcccacacctaatcatgtacccctgtcaacgactcaccgatccgagccgtcagattcccataagcccaccagagagcaggcaacgaaggggtgatttccagcgccttgacgtccgcctcggcttgcgccatcaagggtgtcttttcaggttgagaggggggtccttccttggctgctgcggcggcggcggcttcttcttcttcttgcgctttagcagctttgatggcttgatcttgtcggtacaggtatcgactatcgagaacgcccggatccaaaccctctttcatcagcccggatccccgaatagccaaaaaaaaggaaaagagactggactcgactcgactcgactcgactagactcacgcgaagaagaagaacgctacacaggtgctcaggacaatggccgcgaaaagcatgatccacgcgtagacgggcactccggccagcttgtaatccgattccgatttgaccggttgaacgcccgtataccatccttcccctacctctcctgacccaccgccattgccattgtcgttcgaggggtcataccacccggtcccctcccccgtccatgtggaagtggtagtggtagcagacgcaggcgcgtaccacgaggtcgtggacgtcccctcctccgtcccggtccagggccagctatcttcaaagcccgaacacccggcatctgtcatgtgtgaatcgggcgggcaggggggatcgtcgtgtcgacgggcgaggaaggcgtagggtaggttctggatgggggccatggttgttggaggtagggtatggtatgagaagtacgatggtaagggttgagggttggatgtcactaggtgagtatcgtgtgatggatagattgttcgatgatagaggagtgtcgagtgtgaaaagaagtgagacgaatggattcggaccaaagatcactccaatttatatccagtccgggcctgtcaacccccctgccctccctttgatcgcgtcgcgtcgcgtcgggcgatctcggtccgcagagaggtaagttgcaagatggtcgtaccacccgccacttccgacgaacgacatctaatcagctagacacggacgacgcagcaagggcgctggaaggggggaagggctacgcgttggggagtggcaaacccagccagcccggatcgagtttcaagcaggacgcgcgcgcgcgcgagccctacagcacaaattgtagggagggaagcggcgtttcacggggtttggttgggtcaaaagctggcaaggcagtcgtcaggcgtcaggcagagcgaactgtagccgagcttagtcgggggatgagatcaagctaatgctagactgatgtcggatctcgatcgatgatcttagggaagtcctagccgcgctctgcgagtttacggaagatcagaaacccagcgccttgtcagcttcgaaaggtcattgccgacatacacggccaaaagcaagatagatagagctacagaagaagggacatcgagtgccaccaggccttcgttgttaacctcatcgcatcggccggtctgtcggatctcttcacgtagaacagcgggactacacctttgtcaaacattgcgatttattgtgtcagaaatatcaggaaaacatttgctacagagcgaccgctgagtcttattatagatcctcacctatccaaacaacactgtaaacttgattatagtctgcacaacggacacctaagttcaacctttcatgatcgagaagccagtggacaactagttgcgtccttgcggtagagagcctttccttttcccgaagcgacacccaatctgggctgaggtattgatctgaatagcacggctcatcgacgtgtacccatctgacggggtggagggtgatggacggggttcctgggatgttgagcaatattctagctggcaggccacggcatttcgaaatcctactctgaggcatataggtgcaatattaagaccaacatatcgtacagaagattcaatacccagagtgaaggcttaccgagctttcgagaccctcttcctccgtttcaacgattgttttcaatgtcatgatgctggtccttcgatccgatcgagctttgggccaagtgttgtagcagatgccttcgctcgcgcgatcgccgtcacttatgtccaacagaaagctacgctcgttcttgtgtgtctgtgcttgaggtcggtccctcggcagcgtcgcgaactgatccgcagacgtcatgcgggtaggcggcccagattcgagtgcggggatctccttgaagaacttgccgtcagtcatcttgtccacgatgaaatacagtgtggtactgtttgtgattgtgtaaatcggttgccagtctacgttgacgaggacccctcaagggtctgacttacaggatgatggcaatcgatacgaaagctaccaccagcacctgagcggattctcgcagaacagcgaaaaactcggccatggtccaaggggcagcgcttaaatagatgacgcagaatatctgtccgctacaaatcttggcgatgtcagagacggtatcaacaggatcagatgtcggtgcgacgatgctcgagatggtggaagtaacctgtgcgatggtggaggtcgggatggtagcaggtatatacatcttagatcgctcgagtgttgttgtacgcttcgagtatgtttgggttgtatctggcttccagagcgatgatatattgtggattgtatgatcagtgggtgcttgtcaatattgcgtagggtccatctctcagctacaatttatactcgcccaattgggtagactgatcaggacgcgccagcccgaatcgcgaggatgaaacgctccagacgcgttgaagagtcgaatcacgaattctttctgtgcttactcagctaggcaatcagctacttatgctaggcgaatgatgacatgggaggcttcgctccacgaccctgggtaaactttttcgataagtgacgagacctttcgatttgaggcaaagatcaagtaaggcgcgctagtcctgtagtcaaagacatgttgaagtactcatcaacggtgccgtatatgtcaggatctttccccaaagcttccggtcttggtattcgagggaagtgcagaacagtttctgcggtagaaacgcttgatacggggtctgtggaatctttatggcagtgatccaggctgtttgacgtaaaattcgactgggacctattcggtacaccggcaggcccgaaggctctccgtggatcacggacatgaccggatgcttttatggaagtaattcgtcattcacagctgaggttaagaaaaggtcgatgaagttgagtctcctcttaacctgagtcttcggtgatcactcacaccattccccgagcttgagaacttacagtttgttagccacgttcataattcgtagccgtccttgtccaactcaacaatacccgtgaacacgtctttataaccagacccttacacgcacactcccttcgacaatggcacctactcagcccactgttcttgttcgaggctcaatcagtcagtgaaagctagtgctaagttatcgattggcccgtctgaatctgacgtatcatcccgtcttcttcagatgtcgacgaattctattcggtgcaggacattgtacgaccgggtcaaaccatctcttctcgctcgctgaaaaagatgctcggtggaaagggggccaaccaagccaaggctgttgcctgtgcggggatcaatgtcttgctagatggagccgtcggaggagacgaagaaggagccgctgtcaagcagaaactgtgcgagaagatcgagggttcggaaggcaggatcattggcgacaggatcgctgctgccgaaggggtgtcgacaggcaaagcgattatccagcttgcggatgacggcgagaactgtatcagtaagccctcgtactctcgttcaatcgatctcacatagtctcatcctgctgcggctcttcacagtcatccttggaggtgcgaacatgcaccctcgatcagatcctacaccgctcatcccggaaggtatctcgcatctgctgcttgcaaatgagatcataccggagtccactctcgcctacctggaagccgcccactctcaatctgttactactatcttcaatccttctcccatgctgtccggcgatgcactccgggcttttccctttgaaaagctcgaatggctcatcgtgaaccagggagagatgtcaaccatctacgattcgctcgtcggccgtgcggagggtatctcggactcggaagaatcgccgagcaaggtcatcgagaacgcaacccgactgtacgagaaactggacggcaagaccagcatcctgtgcactatgggtggacagggcgccatctacgtgcgatcggtctcgaccggaacgtccaccgtggctacgtccaatatggaaaccggacatcttcctgcagcgaaattgctcaaccctatcaaggacacgaccggtgcaggagactgcttcatgggattctttgctgcaggaatggcccgtctcgctgcttctgggtcaggcaagaagggaaacgtatcgaaggataaatttacggacgtgctgaagacttgtttgacggtaagcttgaaagaagcagacgcgaggcttgaccgagcttatcataacccctctgtgtcatgccgacttttaggcctgctcaatgtgtgtggagcaagagggtgcgcaggacagctatcgcccgatctcgatggttaatgagcgtatggaagagacgtctgtatgagggagacttgtcagggcggccataagcagatcatatctcaattgaacgacccagtctgagcctgccgtttgcgagcgggtcaccatttatcggcattttttggatgcagcgttgactgatacgattcgcacgcaaatcaataagatgatcgatcaacggtcttaacctccatcacgttgtgtgtcatcggagcaattcagtagcgagagcttcccgaaagctgctagttctgatcatataacaaatgtcgtcgagaagctagagactgcaggtgttcgtttcgtctccactggaatcatgcccggacaggatgcgtgaacggacatcgatggacacgaatgtccgagtttgacgctagacacgctttcgaccgagaactcgccgaacggccgagcgacttatcgaccgaggaccagtgtggtccttccccacccgccgacctgggtatataagtggctggggggatcttctctcgtgtcgatggtgctttcccctcttcgcctcttttacttcatcacaagcccttctttcaatacctaatcatctaccaaaacacaaacttgctcaaaatgtcttcccctgcttggtccaagtgagtgtcgatcgaagtcgaaatcgatctcgctctctcttttgctcattcgatcgtcaacctccaaccttgtattgtaccttctgtcgactccacgcgtatcgtgccctgtctatcatgtaatcaggatcaccaccacccttaacaccggtgccaagatgcccatcttcggtttgggtgagtctgcctcgaagagctcccgttgagagcgtcatatgggaactgtatctgattcttgtcgtctacctacttccaggtacctggcaatccgctgtaagacagctcgattccagtgaacgatgcgaaagagctgcaaactaaacaatctcgacttgtaccctgtcgttctctactagcccaacgaggtcaggaccgccgtcaaggctgctctccaggccggatacaggcacatcgacacgtaagtcgtcaaaaacgctccgctcgagtcgaaggctttgcgagaccggtgcgatgcgattgcgctcctcggctctcggtcttcggcttgacacggtggcagccccacttactcttcgtgagaagctcacccgccccgtctctatttcctccttgtttattacatcatttcttccgccacgctcgcttggacgcgatcccgctcgcttctacacctctcccctgatcgctcgacttttgcttccggctcggtcgatttctcgcttcatttatcctccgatcaaaatatcggtcacacagcgctcaggcttacggcaacgaggccgaggtcggtgacggtatcctcgactcgggtgtccctcgagaggagatcttcttgaccaccaagatcgacaacatggagcacaaggacgtcgccaaggttgtcgacgagtcgctcaagaagctcaagaccgactacgtcgacttgatcttgatgcactggcccgtctccatcggtaagtttcgcgtcgtacgacgagcatcatgtcgagaacaagactgatcgtcatcctcgacatcagaccccgtcgaccgtgagaaccagaaggtcctttacaaggactggaactttgtcgacacttggcgtgagatggagaagatcccttcgtcgaaggtcagggccatcggtgtctccaacttcggtatcgagaacttgaagaccctcttggagtctgccaagaccgtccccgccgtcaaccagtgcgaggcccacatcaactgcccctcgaccgccctcgtcgacttctgcaagtctaagggtatccactttaccgcctactcttgtctcggatccaccggatcgcctttggccaacgacgccaccttgaaggagatcgccgagaagcacaacacttcgacccaaaaggtccttttggtctggaacatgcagaggggagagggcaagcacatctcggtcatccccaaggcaagtcgctggtcatgaccatgctcgatcgatcgatcgatgtcttactgaccgtttgtccacgctcgctctcttcagtccgttactccttcccgtatcgccgacaacttgaagctcgacggactcgagttgtcccaggaggagatggacaagctgaacgcttgccaggacaggttcaagggtcagtttactttcaacacgaagcgagcccgcattcatcatgctgactagtcgccctgatcttacagtctgcaacgagtggctccccgagctcgttttcagggctcccggtaccaaggcctcggacaagggaagccgagacttttacgacaaggactcgctctttgagcgagagtgattacttccgcgtcatcaccagtctgacggtcgtgcgagcgttgtgaaccagccaacttttgtaaccaataacgaatagtcatcgcacaacgtatgcattcatggaagtccaacatgcttctcgtcttcttgcccatccgatgcttttcgtcttcttggtcatccgattcgtttcagtcacccggcaggttgtccgtggaagtatcgcgtgaatgattcgtccaccgttgacggtctcgcggtaacacgaatggacggggcctcagtgcagacgccggagagcatgtggtgttgcgacggggcattctccgggacgacgagtgggtggcctccgacgctttcagaagcgttcggtgacggtccaacacatatggcgacggacaaggtcttgcaccgaaagccgagcgggagatgcgccgcgcattctcggaggatagtcggttcaaatctcgccgaaatgtggtcagagagaattaatttcggctcaaccagaacagccgaaacggttcagccagtaacggccatgaccttgacagacaataatgcgctcaatttcgaagtaatttacaacgtacatcaaccagaaagagatactaatacacgtagtcagaaacaccgccatgatagaatcgcgtcaacccaaaaccagctcgatccaaacgtattgcaaaatcaagaccaggccccacacgagtcctcgacgataaatcatcgagaactcaaatcaggccggagatgtgaatgtagactgcttaagcagaccgctcaggacgccctgtactgaatgcaacagttgtacccagtaggcgctagggtaccatcgaaagcaattttcaagcggagaatcagtcgatctgtccactccttgaacagccaaggcggatagtgctcacctccatcgctgactgtctgggcgcaggtcttgtccctcatagccacattgaagccgttgacagaagtggggaaaaatccggtgaaagcgttgaccttgaaacaggcgttcacggcggccttgtaagtctgtgctttacattctgatcaagtcgagatcgatgataggatagcaaaagatcagctctgggcctgcttgagacccggggcgaggagaccacttacgggagtccgcctgacacatctgggtacaagcttccctcgatcctacgttgttgaacaactggaattggccgggagtaccaatcatgtccaggtctgagtagatggcccaagggacgcttccggtcgaagtgtagccgggacaggtcgaggcgggaagagtcacgacctcggtgaccgtggccgcttcaacgacagtaacggtgttggtcgaaacgatctcgttgaactgtagggcttgatgtcaatctcgacgcaaactccaagctgcaccaaaggagaagtcgcagtgactcacgcgggtggtttcagatacaacggtctctgtagctgtctgagtggcaacgacggtcggagtcgtcctttattcgatgaacgaagggaagagttgtccggatggtaagccacggttacaccatcccgggaggtcaaggctcaaaactcactgaacaacaaccaccgtctcggtcaaggtagccggactgaacttggctgccttgcattgggcgacgacccaatccttgttatccctggcaagggcatcgaacgcgttgctcataccagcagggacattgtcattcgcagctcgcttctgcagcgatccaacgaccgtgaccgtctcggtactgaaggttgtcgaagtctcggttacctgtgcgagtgtaatgcagaaccggtgtcagcgacatgcatggctgcaggcgaaaaaagggaagatgaagtacctcagtggagacttgcacgtccttgtcgatggtcacgaaatccgtcacttgggcgaccgcttgagctgtagtcgaactggcctcgacggtcgtcgctgcgcacgacaacaaacgacgcaagattatgagctgggttccaccgcctcgtcttgacacacaacacacccactcaaagtctggaccgtgacgctgtccaacactctctgacagaatgtttgcatgcctgtgggtcctacttgcttcaagatggtatcccagcggttctggagtccgtttgtcgttgcacggtcattgaggaccgctcgcgcgttcacaaggtccagcgcaagaagaggaagcacggaaaggagggcgggtttgatggcgaccatcgcgtagatgatgagtttcgatgagtgagtgatggagaggtgattcgagttgggatggattgagactgagtcgagttcaggaaaggatcgaatacattctcgaagggaagctgcatatatatatcttccagagaggcatgtctatagcaagtcaatcagtgtgtgatagcggtcacggatccaggacagtccagattccccatcgctacagtgacagccaggtcacatcttgacagtcgcgaatgggtcgccaaagatcccttgtgggatcagtgagatcctcagcaacggctacaagttgaaaccttgagcttaagcttattttccttcttcccttcactccgatgtgtcaagcgaagcgaaaactttatttgactttcacctcgactctcgggacgcggtttcgatcgatagggaataatgttccaggtccatagaggatcggtccttcggatccgaccgaggtagatggctgactttcaccagtccggggcacgcgagcggggacggaatcccgctcgatcgggatattttgattccgtgagcctgtttcgcaagatgtactcactcgtacggaggtttttgtcacggatcgggaagctcgcgggaatgtgacaaacgacgacgacagtcatcatgttcgaacgtggaatcccttggtgatctgttgagaactgactccaatgatcgccgaacgggacgatggcatgtcgcgatatcacggttggacgggcttgcatacccttcatcctgcatcagggtcgatatcgactcaaggaaaggcgcggtgattactgcccacggcccgaccgtgttctgtagaaatacacgacgcgagtgcgaacatgaagagggaaaggccaagctctagtgggaccgcgtcgaacgcgcttccagcgcatcttgatccgcttgagccattagacgagtatggtgtcggattgtgtaaccctttttcgatggacggtcgtagcaaatcacgaaaaagcgtagctttcgtagcaaatcggatagaatcaggcatataacaccggatacaagggcttgcgaaaggcagagacctcagaataattactgctatcgctcggaatacgctgagactatctactgctattgactggtgcctccctcgggatctgcaacgggctctgcgtcgacttcgaaattcatcctcaggagcagagatgctcgaaggcatctagtatttaccgttctgtatcgatacaactggcgtctataagctgtcagccggcgcgtaccatatcacccacttgatttagagacctcgttggcgggactctctgttccgaggtgaccgaccaggtttgataacgtcataaacaaccggatgcaatttcgtttccgaacaacttcccatcttggagatcaactcgatctggaatttcacaactagatcaccgatgaacatatagatgtccggtctttcagtagccaacgccggtttacctctgaaacttggtagctgaaatatcatcgatacctccttgagttgttggagcaccgattcgtgaattagtatcataagaagatgccgccaaaagcctcgtcgagcaaggctgcaatgccgaagaaagagatggatgccgtcaaggaggaacacgaggccgatggactccagattaatgagaccgtcaccacaggagccaatagtgagaaaatgccgcttcagaaatggttgagctcttttaccagccgaggggtgaatatgagggtcgccatggcgttggcatcgaagatgttcgtttcactggtcaactctgcttgacatatcccgacacgggactgactagtcgggccgaattgtccagatatcccacaaacccatcgcaggctgatatcatcaagttgacgggacctaaattgcaagctgccggtattgtcgataaggagcagaagaagagcgtaatgagcgctatcaggagcatcaaattgtctactggttctgcccatgtaaggagctcgttgcctgtatctgaggtctcgccgtccgggagctgacaagacgacttggtaccgcctgattagggaaagatactacaagatgcaaaagactccaagaagcggaaacgcgcattagatggcgagaacccgctcctaccgaatgatccgtcgtcgagcaagggcaaagagagggcttggcactacgacttcaaggagaaccatgacatcgaagtgagtcttcttttgaagtctcggtactgtagctttcttcgagcggaagtctgattccgtgtctcagctcatccgctcgaagaccgtcaaaacgaacagggctccatgcatgacggcctgggcatacataatcctggaaaagatgggcttcgaccggatagaagccctctctctcgcctctgtcttcacatcgatcacctctacgcaacacgctcttaatctgggtaacatctacgatgatgctcagacgagagatgcaaagctcgagctggcgcaattacccggtcgcgagtcgaagcgtcgcaggataaacggcgaggaggaggaagagacaggcgggaacgctcaaccctgggtgggcgtcatgagacggaggctaccggtgatccagctcaacgatgggacgtggcggggtctgacaaagggaatggccgtcgagccgagcaaggtgagtcatccgtacgagcaccggcttgaagatctcgataggctgatgtttcatttggtgattgatggtcaggcatattcttatattacgcggaacttcggtgatacgactccgtatgttatcggagctctgaggatgttggcacaatgctactctgtggacgagttacaagagaaggggtatggcatgtatgtgagtgatggcgtcagtcacaccaggagtacgcggaagggacaattaaactcgaccaaatcgtccaggtttcgttccgacccgaagttcaaggctggggtgacaaggccacgctttactgctcgaatatcattgatatgataccgccggagaacgaagttgatctggccttacacggaactattgtgcctcagccttcggagagcaaggatcaattgatccacgtcaaggaggaggaaatcgacgaagaagcctcgaaacaggtcaagaaggaggtcgaaaatgacgtagccgagatgaagagcgaagaaggaggattcgaaaaggggagagaagacgtctttgaaggcttttgggaggcggagtatgatgacgacttctgaacaatctagcaaaccatgatcatttcgctggattgccgatcagattctcttgaggcatgcatacaatccttgctttgtatcctttacaacgcagacgcttttgcgatctagtcgtccgccgggggccgttgcattcgcttcgcaagactgtcggaaaagtggttgtgtataagcaccgcgtcatcaaacagcagaagcatgtactcacgctgctgacaagtcgagctgaccgatccctcttgcggctggcgctgcaggagccgaaggagcacctcctccaacactcggcttcgcagggatcttaggagcggccggctttgaagggatggcgggctttgatttgccaacgacggatgaagggcgcgaggagtttggcgtggaaatgcccgaccctccgcttcgagcatgaatggcctgggcgagggccggtgccaggcctgcgttcatagagcctccagaagtagcagcaggggcagctggagccgcagggggaggaggagggggagctgccgctcgcggagcggtctttgggaccatcttgaggctggaaggagatcgtgggtattaccatcgcaaccgacggggacgaccggtccgatactcactaatttgacggtgcccaaccttcttgaccattcttgacaatgagccaccagcctgagagataataccgatcagcatcgtatccagggacttcacaaaagctgttcgagactgaccgttgtcgtctttagttttcacctcgaccagttcgcccttcgtcagattcatttcaccctcttgaccttggaagttgtacaaggctttgtacatatccttgtcagatgcagctgcacgggctggaggggcaggaggtggcggaggagccgctcggggggtagccttcgctgcgccattgagcataggagctgtaggcttgggcgtgaccttcatagccggagccagtgcaggcgtagctgttgcacgaggcggcgctgcagaaatgcctgtagggggagcgggcttcgatgcaccaggcaatgccttggcggtgggcctggatttcgcagctcgcgcctagaagtgatttagtcagcaaagtgcttcgcgttcaattcacaccaagttgcactgacagtggctgcgtttgtctttgcctgcttggctgggcggggtttccgtttcggcataggccgagacactgtaagaagtcgttctgcatcagcgagtggatgtcactgaagcggggcaggggtagacagacctgagtttggcggttcgccttgtcccactgttacagtgctggacttgtacacatcgtctgtcctcgcggagggatccttgacaaacttgatgcttgcctttttgtccttcttcttgttgtaatcgatgctaatatgcccggttgttagcgcaattgtcacaccaagcggggcaatggagcttacgttggtccaatgttgacgctgatcgcgccgttggtcaacgacatcaagacttggatcaattcggtcttgaacggtactacgatgatcggatcgccttcttcgcagaccgtaacattgattgcctagcagcgaagacgcgttagtcggcctttactgcgggagcagatccgaaaacttaccatccaatcatcccggtaattggacagagacacgcctcgaatcgttaccagctgaatttttcgttccaatgacgtgttgagacggccgtcggccatagttgaaacaacaatgtgcatgcctttgtcgctctgttgcaagcccggtctaagtgagctggcgacaagaccggaaaagagtatattactcacaacgatcaagaatcgagggctcaacttgctcgttcgcccgaactttgacaccaaaatttccattcgggagctgaagtagaccgattccgaggctgctacccacttgtgtcagtcgtccctctgatctccgcgttctcgatagtatgactcacgaccaagccctgcagcgttcctcaacatttcgccttgggcactccttccgccgacatcgagatagtcgcccatgaacctgcgcataccgagaagactgaaacgacgacgctcttttcggcctcccagcacctgatggccatagtcacgcttgcgagcgtaggccagaccttctttttggtttttccagaatcgctggatcctggttgccatttcgttccggtggcggacgtatccacgccatgcgcgctgaattcgccccgccatgttgtgccagtatcggtcacgcattgtctccaacgcgaacaactgcggtggttaatgtatatgagtttgagcaatgggggggacctgaaccacgcgacgtaccgtttcagggttcttgatgaaagcctttgtaactcccatctgccattcctccttggcgataccggtatctttgaggatcctctcgcaaccggaccgatcgtctccttgccagatatagtcaccggcataggatgtcgcaggagacagaagatagaatctctgaatcatcttggcaaattctgctcggtaggcgaatccagctcgtcgaactcgaatattctcctgcaaaccgaggtacttgatctgatgtagaatcgccttgtcatcgtactcgctcggagatcgattctgattgggcttgatagtacggatataagagggctcggccttcataaggttttcgaccagagcgtttgctgatgactgcgaggtggacatcaatattagcgatgtgcacagacaagttctccggaatgtcgcgtctcactttgatcttgtctccggcagtaggaggtctcttcttcgaatcgggatcaggacgatccgggaagagggtatgtaagaattgatctttgctcgcatcgacaagatccaggatgtccttgatcagggcgtccttgttcttatcagtcatcccagcgacgttgtaagtcacatctccagcgtaatgtctgatcaagaacttgttgcctcggggctcgaagttggggttcgaagacagcatggacgaccgctgaatgaacgagttatccgcagccgagggatcggcatgggcggtggcggtagcatcgttcaaagtggcaaagataccagccggtcgcttatcctcgatcaaagcgcagacgatggcattatcgaagtctggtgaagtagcacgttagtcatgtgcagcctctcgacaggtcaattcaaggctcacacttgataggagtccatttgatttgttcccggacatattcctcctgctcagtcttgagagtcaattcaatgaagatttgttgcaatttctcgttgacatagttgatgcagagctatacacaagaggtcagaaacgctgcgaggcaccatcccagtaagatctttccacttgcctgctcgaaactattgtcctggaaaatctcaaacccgctaaatcgcgcgaaatatagagaccgtcaatatcaagcggatccttcttccgcgatgaaattgcagacttactagatatctaaaaccccgatgacgttgtctggcgagaccttcgcggccattgacacgttcactcgggatacaatccactcgaacaggttgttgtatagagctttcgccagcgcgtccctgccagcggtggcctggacaatattgaggggcacatcgtagatggaacctcgcctgcctccccgagtagtctccatgactctagtggtgaggaccttgacgacttgctcgggccgactctccatgaggtatgcgacaaaatcggtgacatcggtgtcacctactttggcgttaccgtcatctccctcgacaaagctgacgttccccaaccacaggatggtggcaatgactcggaagatggaagtctgctctgcctcggacagaccgataacgttcatggccgtctgtgcacgatgagttatgaccattagtcagtccgaggcgttggaggtggcttcgactattctgaactcacgatagtctctccgaaatccttgacatcatcgatactcgaaacgctcagtgtgttgctcttgctcgtgtagttgtaggcttcgggaccttgtaacccgaaagcctctgtgacaccgcatgtctagaatcagccgtccgacgtgggatttcttgtgcaagatcactacataccacgctgagcttggctagcgccttttgtaaactgatagaagatgtggaagtttcgctccccttttagttggcccacaacccgcccctgtacgtaagcgtatcctatcagcctcgacccgtccacttaatcagacgtatcgaccacgcaccttctcgaggagataattggtgatctgcgctcctacaggttgcccatatgcgttgaacatgatttcgagatacttgccctgtggtgggtttcggctggctttagcggatgtgcctttcaagaaagcgaagcacggccgctactcacgtgtcgactactattgtcattcctcaatgtcttggcgcatccgaaactctcaagtagagggttggtagctagaaccatctccctgatcccttcgattccaccatcaccgcccgcctcggccgagaccgcagcgatatactgcatgatccgcttcgcagcttcggtcttgcctgcaccactttcccccgagatgattacacattgattctccttgtgactcttcatgttgtagtacgaggactcggcgatagcaaagacgtgaggaggtacctcgagacggttcttgccctggtatgaagccaggatagcaggcgtgtagatacccagatcccggaaagggttgacagatatcaacacgtgagcgatatatgtctgtccatattcggttagtgacagagtgtctcgaagaatcggcacgcacaaaggaacctacgtagatctctgcagactcgaatcgcttcttcaggttttcattgattgactcgttgctaatcgtcgacagcaaggtcatgtcgctgactccgacctgcttcttcttaaaagattctttccagtcggctttgaccacggccttgcctccagcgccattcccgctgggaagctgggccgaagctccagacttggcggtcttcttcccggctcgcttagagatagcctagcattgtcaggtgaattgatatccaagccagccgaaatagaggtcatagtgttcaacattagtatggcgagataggcagaaggcgaactgcgactcgtgatcaaacataccatcttgttctgtcagggttcctgttgacgcaatgctagatccgttgcgattcccgtggctgtcggtagcggtgcttatttgagatgggtagagctgtgtcttacggaccaatcgatcccttgactttagcaatccaaacgactttctccggaaggtctacaagcttgatcgaaggctctgtattgttccgaaaccagaccaagagtcacttgccatcaagtttcgacgaccttaatcgactcatgcacgatgaccatatcggccagagcaggccaggcctcgccttacccatcatcatcggcgacgcggttgacgcggaatcaaatcggatatgggcagggggtacacatgccgtgacgtcggcggtcacaaaggaagacagacttcaggtccggccaatcgcggacttctggacaacgagacaaagagaacgcctggcatacacacacatatatatatgttgaagagaagttactattcgtattacaccgatcacgtatcgtcctacatgcaatcaaagtggggcgataatcgaagactgcttggtatcggcgatctacgagcggacagataagcgtgagcgatgttacttcgtgatcaatgttggtgggtgacggcttactgttcgcagggtataatcgtctccgttctgagtgatatatcgaacccaaggtagcgaagagtatccagccttttcgacgactttgaggtagcgcacttggattccggaaaccgtaaagtagggaatctcaaacttgaccgaaatcggagcccgcttgtccacctcgtctacaagcatgtcgagaaggataagtctggtagcaggtggagacgcgagtcgacagacgcaaacgtaccatttcgcacactaggaaggccaaagtgagctcgcatgaggtactctttagcaccaccgagttgcttgatcttccagacaaaggcagacttttccggtgcatatacaaccgagcccacggatgcctgtcagtgtaaagaaatccagtttgagtaatgcgaacaatggtaactaacatgtgctttcgggactcactctgaatttcgggctgtccgcgtcatccggaacatgaacgtaaatctcgacgttgttggccgtgctcctcctcttgaattggcccttgaccttgaccacgtattccacccgactgcccttgtggttctccacactagcctccacccagataagaggtttgaccggggtcgatagacggtacgacatcaattcgaactcgccatcaggcgggataaaggagatcgttcggtcgttctcgaatcgagccaaacggacacattgatggaatttgacatcctccatttcgatcgatttccctcggttggctgtgagtcaaagcgatgagagcaggatcacacgatttctgttcatgtcgactcacccctgcccgtgttttcgaacatgactttgtcgttcaatcctaaacgcaattcgggcattcctgacaaataacatttcatcttgacggctcctaagatctcgctcctgatcacatttccgctagcattgacctggacctcgcacacgataagcgtagagtcgccaaattctcctgtgtacagccgttcactcaccaagagattgacactctccacgacatccaaaaacacctcgttcttcctgtacctaattccttcacttctccatgaaaccgcattcgtcacggccacaggcggtctgatcacttccagcttgtgcgattcttgagtgatgtattcttgtaggatcttgctttcggttgtctgagggtacccaaagtccatcatctcgtcgagcagttcgtagatgataacaaagttatccctgatagattcttcctcgagctccttgaagtattcgataaggacctgagagaattcctaatcagcctgtcagatcgctagagcttgtaactatgacacttactccagccagtctgtgcaagaagaggatgatctcgactgcgttcgagttccgtttcgacagagccaacactgtcgataccaagcaagttagtcttgctgcatcgcccctacggtttctcggcatgtactcacagtacagattgttatgacggatgtgcatgtaattgataccttcactcgagaagcatggggttaccgggatattctcttcctccatttctaggaccaaaggcatgaaccgctcgatataggtcggcgagacgtcatctcggtatgaccgttggatcaaggactaatgagaatggtggcttagctcttgacgtggctctgagcacttgaaagcgatttacctttcccttgagatcgcagatacagactgggattgaccgaacagacatgagtctcttgcgaaccgctggaaactccgggtctcttgctcgactcaccgacactggccatccttctttcgcttgttctcggaactcgttgcaaggaatgagtgtgtgggcaccggtagtccgagattgcctacagctgagagctggacgtagttgtgatatatgtctttgcgagctttataagaaggggctgggcaacatgatcaggttgaagggcgttgcaacttcccgatataccgaggtgaatagcaaacaacctgattcccgcgtggtcgcgagctggcttcaacgcggcggcagcagccgacaagtcgatcgtcttctcgagacactgacaaactaaaattggtcattcgtctggttcgctacagataccgaattaaggaaggtatatatgacagctgctgcacattggctacattaaaacgtgaaggtgatcggatcaaaagtgtatcatctaaaggcgcacaaaacaagcggaacgggttatgaacagcgaaattcaatcgacctggagatctcctatcggatgagataagaaagggagacctggacggcacaggtaattgctaccacgtagaagggctggtagtaaccttctgggttgcctttcatagcagaagaccacacctgccatagcaatcgctagcgatcagtgaggctgtccgttccagctgtttcttggtgcttacgagtccaccgatgacggggccgacgaatcggccaaacgagaccaaggactgagcgaacccgttcgccagccctacaacatgaggaggtgacatggcattctgcaggcgagcaaaactcgatcagcaggccgtacttcactaaatgaaggcagaggtactcacgacaaggaccatgatcgaggtgtaactgaaagttcctccagcgtaacgacaagccctttgtacagcacaaggagacgtgagtatgagtacatccagttgcatgggaatgacgaacatgttgacaatgaggactgtgacaatagcgatttcatataagcccaaatccttatagtcatgcttcatttcactcacgcatcattaccaccggactgccgggggtctctgggttggcgaaccgcctcagcatagggagagtcaagtaggcggggatatacagcatgcttcccaaacggaacatgtgtagatggcttagtttgcctcgagggggtctaaacagaggcaatttcggattgcgttagccagtgagaatcccggcggaaaagcgggcccacaggcgaaaacttgcccaatatgaggatagaggtagaactgttgtttgagagattcagcatcgatggtgaagccacgcatggtcaacggactgacctggtagtacagttggcacaagcacatgatggcaatcagcagcgagaaagacgacgggaaaaggccaagaccgccagcgcggtattcgctggatagcgagggcaagaatcagattggaatgttctgcaggaatgtgtttcgcatcagggacttacgagaccaggaaagtcatgaaaatctgcccgtgaactgtgccacgggattgcaagaatcagctcagctcgcccctgctcagtctgcacgggtagacttgccggtgtcgtgaaatgcgagaaggccgtattgcagaatgatcaatttcggcaaggcgcggaagttggactctcctgccgacggcttgacttccggttcatcggtctctgttcgtagcctgatcgtgcctgtctcactcctgctgggcgagtcggctgcgcgtccctcatgaatagcactgagacctccagcatggccggtcgcctcgccctggctgtcgagataatccgactcataggcagcagcgatcgctggaggcgtttgcagtccggtgttggtgtaaatagctggcagatgacgagatactgcggaaaaccttctgctcgaaacggagacgcggttcatgttggacgagatccggtggttcagaccagcctccgtgaggcctccgagtcgaggtttaggcacgatgtggtcgggctcggggatgtctaataggggggatcggtcacggtacggcgagttgccagtgaattggcgggagggtgtagccaaatgcgatccagcctgggagccatcatcgtcttgggtttcgtcctcatcctcttcatcttcgaacacagcggaatcctcggcagccgtcgcagcgctgacccacagctcattcaggttgaaagtgttttcctcattggctggagagacgatacaatctcagcacggtcgatgcaacccagaccgtcgatcagatggcctacctagcaagaatttcctggctagaccgagatgttcgtgatcctcgccggcaccagtgtcatcggtcgcgttgccactttgagcagccatcgctcgggcagccatctcctctcgtttgactcgaattccaccgtatctgaatggtaatgattatgctgagcctgagcgataccgcaatacaaaattaagacgactcacccgtatgcggtaccgaaactggcccggctggccctcctgttacgttcttgggcctcttcgtccttgatcgtagcaactcgcatttgcgcaggggtcagatccagtacatcgttctggggcgcgaagaccgaagaagccttcctcctgatcgtaccgcctgtcgattcgggacgaggcgaggcgtccagtgcgggagcaataccgttctcctctttgtctagcggaagagcgatgcggggtcgacgaggtccaccgtcccaagagaggcgggtggcgagtaatgcgccgatggtcaagattgctccagcgatcaaagccggcaaaaggtatgggtatgtagcgaacaaggctgggatttgcgtggtatatcagcgtgggtgaaagggatgatgacggtcttattgctcacagattttgcccaaagcccaatcgggatgattagctgaagggctctcgaaaacgccaccgatgatctgtcgcattacaaccgtaagcaaacatgcatgtcgcacacggttcagctcgcgttgcacatacgggaccgacgactgtgaataataaagcgagtgaggtcagattggttaagagagaactcataaagacagccctgatacatacctcctcccataccccatgcgaaaccaaggatggcataggctgaagcttcattggtaggatcggtaatatctcgaatagaccctcggaagactccaatgctccccccttgtagacaggaaaagaacctcgatgtcagcatgaggactgtttagtgaaccgccatgaaagaattaccaaagactccttgagctagcctgacgcagattgcctctggaagctgtgaaagaacgtggaaaaatcagacctggtgctgacacgtcgacttggactggctggacccaactcaccgaccgcgatgttccaaaggtcatcaccgctgtatattcagtaacaggactggctgtcagatctgctttcaagccgtacgaggaagatccgacccacacaaggcgctacccaagagactgatgacgagaaccaatcgacggccatacttgtcggcgatgctgctccacaaaaggctcgtgaagaattgcgtgatgaagaacacgctgaccagattaccggtccaaaatccgacgagcgcttccgtctcgctgttatccgggtgggctccgtgagatttaccttcagataggaagaatcctatatgacatgtcgaaagattcccagtcgtaagtgtgaagtatgggtgtgatcggcgtacaacgctagcttaccgcgaaccattctcagaatgaacggcgtcgagacgttggcagagaggaattcggacatcatggcctgtagtcaagttgatatggcggggtcagacaacggaacagagaccttgaacctctggggactgaacatacgatagacaacacgatcatcgctagcagcggcaagggggtcgaataagccggcctgattcccggtaccaaggctggaatggctggtttcccctcgttcccgaattggctaccggcctcgtctccatccgctccagggctcatcaaaccacgcctcttgccattatggatgctggtgaccctactggcccttcggttttgactcgaaaagctctgtcgagccgaacgatcatgcgtgccactcgcaccgcgtagtctcgggtgaacctgctccacaaaggtcggcttccttgtcgatcccccaactgaagggctcaagtggcttcggttgttggatcttcgagaattgatagaatcaaagacgttgcgatgcggacttcccgaaggggattcgttggcggacgatggggtaggtgcagagtcgagagctgaagaggcggaaaacacgtcttgcggagacggtttcgccggcaacgcgatgtgcgagggtttcttcccattcgacatgacgaacgtcaggccagtgagcttgagcttcaatgggttgactttctaagcccgtgtgggtaagtctaggtgctgttatgcgaaacggggttgctaaaatctgaacaggttgtcagggtaaatatgagatcagctcatcatcatcaatctcgatatctcaggatcagctgcgcgtcggaagcaattctctcacaggaatctctctagcgcatagagcgacagagcaaagcagtgcgtgtgactagctggtgtgctcactaccattcgtggtactgcgtttggaacccagcgcggtatgggtagaagataaaagagggggaagtcagctcattggatccagcggcagaggcgtggccacggccctttgacaagaatcagcagaccgccgatctgccctgttggtggggggcctaggcaagaacaggtattgcgaggactccactactcgagcatcaaaagatgaaatcaagaggatattcatgcacagcagcgagaaacggagcggtagctcagtggtagagcggcagattgcaactagtttttcatcatctgtaggtcttgagttcgatcctcaatcgctcctgttcttttttgctttttgtgcgcgtcttcattcgtgccaaatcgccgttatatatccgctaaaccggtgccattatcatgatagctgacccataatatcagagagatgctattcagctgtatcattcacttgaatcctgagccgcttggttgacacgtcgactcgtcgtcccaatgcacatattttcaggatgatgtcggagcagtccgatgtatgactaccagcatagatcgccctgcctccctcattcggacaaccatggttcgaagacacgtcagaacagctcgaccagccgtgatactctctgcctttcgcttcgaccgactgtaccgtatagttagattcaggagcagtcagccgctttgtccgccgcatgctttgacgttcgcgtttcagggggaacaaaaggatatcgcgtttcggatgaaaatgtggatttcgcttccgagacattctcgtcgacttgggttgtcggttttgatgatggtggacgatgatgatgatgaaggacgcacaactatcaacgcattggccacccaaaagtgggaatgagtcgaggttcaacacagtgtaggtccccctgcaggatccctgacctctgatgatagattctctcactcgctgagcttgaccccaccaactctggctaccgtccgaaggacccctcacctcgaccctgcctttcttcgataacacggacgacttctacatctttacttgatccaaagatacctgcagcatttttacttcgacatagtgtcgaaccctactcgagtccacctgcgtcccaccgtcgccatcatgagtctgtttcgccggtcgaaatcgaaaaactcgatcaaacaaaaggacaaaccggtagaccatgctcacgacaggccggcccctccagtaccacaccaggcgacgaccgagagcggaagattgccatttgatgatatgggtatgcgaagagatagagatattgaggtcaagacggcacccctgggccgacagaaaggaaaaccggagaatctacgagatcgcgttatcagtcaaccgtaagagcggatcggcggcattcctgtcgtgtctgagatacctcgactgacgatgctcgaatattgcatagtcgaataatccactctacacacgcccaaccgtctccttcgctgtcaacctttaacgagccgactcccactaccaacaactttcgtcatattgggccaacctccccgatgcattcaaaccccgtgacgccgccatcaccgtttatcgcccagtccacttcgacatacatgacgacccgtttccccctcctatcacgaacaggcacgctcagctcgcaagccagctcgatgactctatcttcaagcttgtcccaaaatctctcgggaggagcctgggtgggggttgtcggtgctcgccagagtgggctagagccgacctcgaacgggacacgaagagggttgggttacatgtggcccgaagcaggcttggtcctcggtcttgaagacttggtcgggctggtagaagactgctgtcgacagctgatgaatagaggcgagttttggacgatcagtatggaacctcaacgtgtttttgctgacattcaggtgtttctctttttgtttctaggccttaaaacaccgctcctgttctcgtgcgaagcgctacccttttccgctcatcgccttaccagcctcctccaatcctttacatcaacactccggccgtatccctctcagatgcccgtctcgcatcaagccaaaaagaccactgaaaagtatcgcgcgtacgtcgaggacatgacgtttgccggagaatgcgagatcgcttggctgttgaggtgggggcttgccaaggtcgtccgggtggacaagactgggagggaaggcggaaccaaggagtcaaggggtctgctcgactgggaaaagtacgaagactggaggggtcgggaacgaggtgagtggtatggttcatgcggaaggtcaacctggcctgatcaagtgatctgcacgaacagcctcaaattatgatcctctgatgttcgatatgctatatcgaggcgtgccagcgacgctagtgacgatactgaaggagctcttcaccctccttatgcacctcgctgccaacgcaaccgactctggcttgacgccgagcgttctgtctggcctcttcggcccgctcgtctttggcttaggcccgcattcttgcccgtttgacactgcgcatgccgcttttgttcgatcgtccggagccctcgaacacctattgctcgcgtttgtccggtcagaagaagccaagcatgatcgattaaagggaggctttcctggacgtcttcgggattggataaagggctacccaggaatgatcatatctgatcgcgaactggatcaaggattgccgcgccgcggcgtcaaagtcaaacggttagaaaaggtccgccgaaacgtacgcgcatattccagagacctgctcggcagcggacaagaatgggagcaagagatgcgaaaatgcggcgggattcagtgggaggcttggcagtcagttctgcctcccgccgtcaagacacgaaaggcaggacctcgggtttctgaacagccaagacaacccacattgacggatcggcatcgaaagcgtctcttcctggcgaccgacacgattcctctgccgatctcttcgtcaccatctgcggggttcgaaaaggtcgatatgcctggaagtctgttgaatggatccagtacgacccaccttgcaaactccacctcacacgactcgctcatctacaagcgggaaaagtacggtagtcttgccgacaaaagctggagtgaattcgaaggtttcggcttcggagaaggtgtcaacaaggatagactcgaattcaatctatacgagggtgccaagaaggtgattcgtcggatgtgcagatttgcgaagaaattcgttcctgatcagcccgacgccccacaggagatcatgcaggccaaaaggcagaccctgtcgtggcaggacttcgcgtcacctcagggaggtttcgatcggaccaacgaagccctatcaaagtctctactgttttcgcctccggtccaggaacaaatccagcaatggccagaagaacgagaagaaatgcagaaaaaactcaagaaggcattcaaggaagccattcccttcagttgggacatgacacccaccgtgatcaacgctcgaggggcgttcgtcgaggagatgtttcttgatgtatgggtagagttgttgtacggaggaggctggaccgataccgaagagttgacgttccgtgaggccaattgggtgctagtgagtatagccctgtgtcttccgaacaataactaactttgtctgtaatcaggtggagtatagacaacaaatcagtcgctcagatgcagaagacggccgcgtctttctattcgaggagatagtcccggcggcctaccaggatcagattgccaatcccaagcagaagaagacgggaggcttattctcgcggtcaaagacatcgaagaacctcgcgcctaggcgggaaccacccatccgatccaaccgcgacgaggtcgaattcgacgccatcctccggagacatatacccaccaaacaggtcactttatccaagccgctcaatgggacactagctcatgtcgggaatggactgcttgtgcctacaagcacttcgagtcgaatttccccctctcgaagcagattcatggcaaggcctggttccggtacaagcaagacggacaagaacgaaggcttgtctggcgcggatagcaacgggatccactcgatgaaaggtttgttcaagcgaaaagagtctcaagaggaaagagctggacggcagcccgctgctccgatctcgagtgaatacgataacatcgagacaagaaccatgtccgggccgagtagtggagagagtaatgtgggcgacgaagaaaggcggtcttgggcgccaccgaaggccggacgccctgagaccgaaaagtggatcggttagtcgccaggcagtaccgaagtgggctacgactaataagccgattcattccagacgttctggttgccaatggggcgacacatgtaaacagtacgatcagcggagtggaaaccttcagcgagagaccgttcctcctcccctcctctaatcagacccacctactctccacgccgcctggccagaagacgatcgacggacggttctcgaaggcgtctagcaaagagtctctgactacctccacccagactacccttcaagcaccaccacggtcgccacaaagtaccttgagcatctcggatacggcctcgacgccgtcctcccagagcttgaagagcaggcgtcaagttggggacgactcggggcaagagatgttatcccaaactcctaccagaccaacgatagtgaccggtgatctgcggagagatatcgagctgatgcagaaggaagttagccgacagagtttcgatgaggttggagaaacgctcggcgggccgatcttggggtctccgttaccgatcaaccctcgcgatactgtctttagcgtcattagcgggtacggtcatcatcggactcacagcgatggagtctcgcccatagtaccaccagtccctcctcgacccgggatgggtccaaacgtagaagggacagctccacctttagtcctggcagccgcgctggataagatcggcacttcccgtaatgaagagtacagacaaagttatgcatccaactacagcgagaccagcaatttcactgacgatcccctcggtggcgacgacggcgatacagcgagtcacgtccgcgaatcgaccgcatcctcggaatacacatatcagccaccaccgcccattatcggagtagacgacattgcagcgatcgctagacagccaagtccgggtagggtcgagcacggtattccgctccagtcctgtaggttattgaatccgagcaagtgccacgtcgcgcatcgtaactgataacgtggcattggaacagtgcaagaagaagacgaggacgatgaatcacaatatggccccgtacctagtcgaacgctacggcggcgacgaaaccaccgatagtgttcgtccagtgtcgtacttgttaacccatcatggcgcttgcgaatatggcgatgatattgaaaaccaagttccggaaagagcaagcggattgatgggcatgatgtaggatggcattaatactataacatccggttcgagatatatgaaacaaggattcgagctttccgatgagaccagttcgaggagggcatggcaagaagggcgggatgaaaaaatgaagggtatcgagcggcaaaaggtgtgtgtgtgaagaagaagaaaagcagtcttgcagactgtcgaacaagtcggtacccccaaaaaagagagatcaggagggggatatgggaagggaaggaaactagcgcctgtgcattgtcgactggacgcgacatctagacgatcacgcatttacatccatccgaatgcgtatcgtccgtcccaccccgcttgtttcgagcgggtgtgttaccgatcccgtttccaatggggccggtcgcgccacctgtagcggcggcctgggtcggatacgactcctaaaaaggttgcaaacgatccgcatgagccaacggccggtttcatcagggacaaaagggcatgctgtgaattccggctgaccttgttatactttcgaatcgctcggacgagctcgtggaaactctcatccacatcgatcctcgctttggcagacgtctccatctgtgtcgatccaaacgaacgagcgagttgcaggccctctgcgtataagccgatgaatgtcagtaagcacgcacgaatcgtcgtcgaccggcccggactgaccttcccggtgcacctgccgttctccttctaagtcgatcttgttggcgatcacgacgaccgggaaataatccttgtccttgacctgaggtcgcgaggcgaggccgagattcagcttggaggcccacgacatctccaccagagtcgccttgaaacctacccgcaagatctgttgatgaaacacgctaatctcgtcgaatgacggtctcgaggtgatgctgtagacgagcaagaacccttccccggtccgcactgccaggacgcaaaccgcattccattagcgtcccgatcgaacgaacacgcacgggatggatcggaagcggtgactcactgtactgttccctcatcgcgccgtattcttcctgaccggccgtgtcgaggacgtcgagcagcgcgacctcgtcgtcgataaagcactgtttacgataagaatcctcgatggtcgggtcgtacctgtgcaattcaaagcaaggtactcgagggtcagctggtccggtcgatctgcgcgttttggtcgttggtcatcgtgacttactcgtctacgaactgaaaagcggaaggacccgacacggggtttctatcagcttgcggctcgacgaatatggccacctcctcgctgtcggttctttctcccacggagcacatcttcaaagcttcctcctgagctacttggcatccacgagcggtcccccggcgtgactccgcagatgtctcgcgccatcagctgacgtccaccttccacgtcctttcagtccaatcagacccttcgtcccagcttcaccgttcccggccccaactcccaaccgctcgaactaggaacagatcgccctcacaaagaaatacatgaaaaaccgctccgactcacgtgtccctggataaactggatcgtcaaggctgatttccctacacctcctccaccgactacgacgagcttgtattctcttaggaattgagcctgcggggatcgagcccgtgtacccaggtcggaattgaccagagtgagacgtttccagtgaacagccgcgggtgaggcgtgcgagtgtcaatgtccgcgagagattgtcgccgatcagaggcatgtcgaatatccagaacaaaggcgaacggatcatcaggcatggtcgttggtggtcgacaccaccatatgatgtgaagcggagggtgacgataccggaggatacgtcggcgatgatcatgtcggtcgagtatcgaggttgtgtatgggtcaagagtggttgacatcacacacacatcgacatcgacatcgaccgggagagtggatatcggatatgtagagcacggtgccaaggcgaggcaagaagaaacgaggaggataggcggcaaggatcgtccgtacgagtttaaccgccattatcgatccaggcagggtaaggtaaggtcacgcgagtggacgatccgtgaatcaaggtagacgtcgatattgcgatccaggtgtcggggtcggagttgatggaagcgatgacgatcgccaacccgccgaggaaaagagacaagacgtaggcaacaagaaggaacaagggagtagaagataagtttatcagctcttccggtacctcaacctttggttctcgcctcgctatctccttccgtccgtccgaccttctatccttctgtcgaatcgacaagagacggggctcaccttggacatggttgtcaatattcgattcgattcgtcttaatccgtacttgcgttcgtcactctgctctgttatttctgctactcgtctcgtgtgtaaatccgttcgtccgcctgtccgtcttgatcaatctctcgtctgatctaaagacgtcgatcccgtgtgctgatcgctctctcaaggtcgatctcgaagctctagctctagctctatcttgattttgattttgatctcgtattcacgacttgactactgctgttgattcagcggtcgttccggggcgtgttggtcgtgaatcccagacgggtgactggtctagatccggatctagatctaggtctagctcttcctctaactctcgcggtgaatcgaacgagaatggcgtttgtgtgatggtcgagcgaaaggtatatacgacctaggggtggtgggtcgatttcaagaacgagcgcgagttggcggagatgagtcggggtcggggttgggtagagtcgagtcgagtcgagtcgttcgggcgagccgggaaagacaccgacgggaggaacaagaagagaggaggattggggattggacgagatggggatggacggatagcctgatcgagtattgtcgacgagtgtttggtgagtggtttgaagtgatggacgagtgagcatatgatgggcaagggcaagagagagctggctggacccatcaaagggggggagaggagggcggtggcagaagcagggcaggggaagcagggcagcagcggggagaacgagggccagggcgtgacaggcaggggcaggccggaggcgagatcacagcgaacgcgcgcgaagccacgaggtaattaacggcatctcatcccggttaaaggtaaactgaatcagatcacttcgaccgtcccacatcaaaaacatggatctcatcagatcatcagaccgaatcgaatcaaagaccacgtcgagccacagtgcacatacattcatcgaaatgagaacggttgttctgcgatctgcgtaacaatgttcggggctgacacaatgaacagctcttcccccccttcagctcactcggccttttccgacctcgccgcgtcttcaccaccgaccccagtgttctaccctgattcacgtttcatcctctcaaccacaaggttcaaggttcgttcaccaaacatatcgatcgtattcctcttgcctctttcagccgatgcataacaggtgtctatttttatgatcatatcctccaggacatcccgccgcaaaggaaacagccctgtccgttaatattcccgtcgttccgtcgatgccactcgtattgggttcgaggattatattttcctcgatccttctagtccgtctaatccttatatggaatcccgtcgtcatctcatcgcaaacgagcaccttgtatacgaatctccatttgtcttcctgtctctctgttatttaccccagtcaagcacaactttcgtgtgagacgtatcctcttatactgtacaggtctttagagcacacgatgtttatccctttctatctgtcttaccttagctgcctcctcactcaaacctcatacactctatggatcaggtttactgctgactgtcagccgtgacaaaccgctccacatgtccttgcctgcctggtcggacggtcgctcgtcctatgcattatcaatcccttcgtcatcgtcgtcgtcatcgtcgatacgcaagcccagcctgtgtgtcttctatcggggtcggagtacgactgaaacgagaacccccgtagatggtaacaattgacaccaggaaggtcgtcctcgatcatcttgcccattgtcgagttcgccttatcaaaataatgaccagggcccagggatagtgagaaagctggacaggacaaggctggattggaataaacaatgtctctgaacgtctacccgttcgtgtcccaatgacacgatcatcgactggccctcccttggtcaagcgacgagggcgacaagtcgctcgaagacggtcgatcgatcgttggtatcgttgcccttcttttagacaacttggtcgagacgctgaattggacattgcttcacgcccagcacatctctgatctgctcaacgaacccggcggtccttttgtgtaaacggcaaatcctcttattttttctgtctctctctctctcttcctcttgcatcatctacaaaaatcgacggacccggcgtgatcccgggatctacgtacgagaagacccctgccgaccgcccaggcccgcccgtctaaactcgagcgcccaccactcgtcttccacctgctgctccctgtaccatcgtctgcacctcctcccgcttacaaagcagaggcaccctaaaagtcacagcgtgaaactcgatcagcacggacgatctcggtagagcgaggcgagacagggatagtatgactcacggtgatgatctcgatctgtcagagtgaacgttgtcgaatgcaaagaggaacaacagacgatcgacgtgtatgttagccatcgactctcgaaccttgtccgtggcgaaaaggcggtaagccgacgtacgagctctccggtaatctttccttgacgagcacggttgtactgcaagttcaactttccgatcatgtcggcagcgtctacaaagcgaaatgatgaatcagcatcgagagtccgctcgcttcaacttgggacgcgccgaccgagactcacttccagaagctgtaacccagaacacgaatccgaacgacaagacgtcagccgaccgaccaactttaacgacgcctcccgccacacgcccagactcaccgttgtccatggcagtcctcctcgcgctctgttcggcggcgtgaccctcgacgagggcgaggtagagggcgttggccaaggagaactcggcgatatcaccggtcgagtcttcctcctgctcgtaagccttgaacccggcggcatcgttcaacgacttggcgttggtgacgaccaactcggtgggctcgtagctgatggccgaaatgtacttgttgtagatgatcttgacgacgtcccaatccccacccttggtcttgatctcgtcggcgatcgcggcagcctcggcaaaagtaggaatgtcacgtccgatctggttgaaagtgatgacaaagtcgtcggtcctgctcctggccaattgagccttgggcttgtctccgaggacggcgacccgggcctcggggttcttgttcaaagctcggagggtggccttggtcacggacgagtggataccaccgcaaagacctcggtcggaagagatggcgacgtagaggaccttggcatcaccactgtccgaaccgatctccgagttcttgaagagctctaccatgggggtgtcgcgcgacgtacataaggtatcagcccgagtgttcttgcgcccaccgtatctcctgcctgacctgctccgactcaccctcgttcgcggcaccgtacttcttggcctgcttcatggccttttcagctcgggtcaacttggtcgaggcgacgaccttcatcgacttggtgatcttttcaatgttcttgacggatttcagcctggaattacgaggaggaaagagcaagggtgttgtgcattagcgtcgatgcagggttaacggggaggtcatggggaaagacgggtttgatcgggcgaggttcgagaccaggggggtttgtgattgtttgagtcggcttggcgcgtttcgttgacgagtcgaccgcacatcgtggcgacgtagagagaccgggaagaagatgcaggaacaggcatcgaatagaggtcctcttgtgcggatgaaccaggtcggactgttcttgatgtcgattcccccagccatctcccactggaccgatgcatcttgcaattcgtcatcccgacggctgttgatctcctcaacaggtcattccgtggtcgaatagtcatctcccacgtcggccagtaacccagtctcgccacccctttgcctgaacagtctatcccgcacgtctgtccgtcccggggactcacctctgctcaatctccttcaaggtggccatcccgttcttctgctgaacctggacgatgggcctggcggccatgagaaccggacggacggcggatcgagccaacatttttgatagtgtgattgggttgagaggaggaatgtctattgggtgaaagaagagagggtgggagagattgtctatgggggagaaagaaggttgtctttgtgatcgggtcgatgttatggcaaggtctcggaaggtcgaatgaggtcgacctgagagtggtcgagttccagcgcggaagagtgaaaacgctttcccacgcgcgggagagcgagaactaaaggggagtagctgattgttgcaaagtcatgaattatagacacgtcatggagtccaacctgttatcaaaataataccttcgacacctctcttgttgcgtctatataacgagctcgtattcacgacgagtcgtttgcaccaagaagaaatatatgtaagattctccctctatacgatgacatgatcgtcttatgcatgcttcatttcgatcgaatacgagctgcagattggggggttcattgcgggtacaccgactataccatccatgactctgccgtttgatccgtttccccaatgccagagcctttgatcacccgctcgcgcgcggaagcggaaacgggaaatcatggaacacacacacagacacacaccatcaaccttgaacggagagcaagttgtgaaagtctaccgtgcatcaacctatgcatgctcgctctaaagtgatctgtgacaacctggcctggtaaaagatcagtcacgactgtagcttccatctcttcactcgaatctcaagtcatcgccatcatgtggaccatctgtcgtccagctctcgtgtcggctagccgccggacatgtaagtctctccctcatcccccaacagacgagcatgcatatccatagagtcgagctcggctgacaccttgcccactttgtgaacccgctccatagtcgttcgatatgcctcgtcttctttgaggatgcccgctatgtcaccgaccatgaccgagggaggtatcgctggttggaagttggccgagggcgagacctttgctgcaggggacattttgctcgagattgtgagtccccaaggcacttcccgagcccgtcgtcttcgggctcaccatgtatacacaccaatcggcgtggtaggaaaccgacaaggctacgatcgacgtcgaggcccaggacgatgggatcatgggcaagatcatctcgcaagccggatctcaaaagatccccgtcgggcagatcatcgccgtcctcgctgaagagggggacgacctctccgccctcgagattcctaccgacctttccccgcctagcagcgcttccacctcggggaccgaccaatccacctccagctcgagttcgagttcgagctcgatcactgagaaaaaggaacaagcttccaccccgcgtcacgataccccctcggaatcaccatcgacgcaatcgacctcggcttcccctaaatccggcgaaccgaccccggaggcccaacgtcagaacacccctcaggccggtagagagacggagagcaaggccgccaagatccagagcgacggtgttcccgtggacgtcggcgcgcacaaggggaacgtacatgcgggggcgagcgggaggccgttgttccctagtgtgatgcgattgtgagtcgagctcggccttgccaacgcacgggcgggggggatgttttcgcccgtctcgttgtatcacctgggctcatatctgactatttgttcatacccgctcgatctcgatctcgatctcgatctcgtcacccacagactggcagaggctgatctctcgccagaccaaatctcggcgatcaaggggacggggaggaacaggatgttgaccaagggtgacgtcctcgccgccttgggcaagatctcgcacgccaagggaagcatgaaggggatccccaagacggtctacggcgtctcggccgggtacggagacgtgagtccgggtctttttgaatttggcttgtgattcgccgggcacgtctacgattgctgacttttgcacctcatcgacatagaacgggacgagcacgggagctggggctggacccaagacgggcgcgccaaagccggtgaaaccgttgacggcattgcagctccgtcaggccatcttgagcggtttggaaaaggcttcactgccagccagacccctgtcggcaggtgggtcgggactgtcactcacccctccatccgttttggtaaccgtcgtctgatttgaccgtctttcgctccctgcagcgacctccgcattgtccacgtcgtccacattggaacacgactttgactcgcttttggagtcttacggtaccctcttcagcaccgagcgtaaaccctcgggcgtacagatccctctggaactcgaactcgacgtccagcagggcgggtcgagcgcaaagtctgtcaagaaggacgagtgggagggtttgttctagatgtcgggcgtgtgattcgttgtggggcttgtaggtatatcatttctctgatctctttggggggggatcgagatcacggggactgccctttgatcatcaattttatacatatagacacgattcttcccttaatgacggcgaatttcgatgttgacacgcaggatagtttcgtacttttccattcgtgtcggtagaccggcaggcatcgtcagcccaatttttctgagtgatcagattctagtatataggcggtggaccacacgtcgggacctggtttgccatgagaactggggcttttggaatgtctccgatcacctggagcacaaccccggtagacacctggaaagacgtccaaagggtcagggtgcgctggcactccgggtagagaagtctggtaatcagagcccagcatcgaaagaagtgagatgacacgacgttcatcgtagacaatgactggatcagctataactctcctgagttctaggtagaggaggaagacacccctcaggacttttggagtgtctccgacggttcgcgtatcacctgtcgtcgcactgagaggtagtcgagagacgtcgcggaagtcctcacagaaacagcccgtcatacctttgaggcgttgtatgctctcgagacgattgcctccgcctcccgaagggtttcgctccgcgaataagccttggtatagtgggatagaattcgaaataggcgaatagactgcaactacatgaaaaaccattattgaaacgtcgttgtgaattttgagctagaatcagggcatatgaaaaatcatcgtgcagattcgagacgaaactctctaagacttcgtgttcggtctcttatgccgcactacacttaacctttgacaccttcaacaacttcgcagcttggtatcctacgtttgttcgtgctcaccaactgcctttcgttctgcactactccgttttgcggggtccctccgactagggaaacgagtaccattcggcatgctcctgtttcgccgtacagcggcgacccgctaaattgtggagtgcggctagctcgccgagagcggttgagcgagcgacagaatcgacacgatgacgagactgtacgatcttgaaacgctcatgacgtagcttcagctgtgtccccggcttcatcggtcaccggcaaactaaatatcccgtcgtcgcgactggatgaaacgtctgatcgaaagaggaacaaaagcgaaagaattcaaactcacgcgcggaagcaactttttctcgatcgaattcgcgtgtcatcggcgagacacctgttcttttgttccctctctattattcgcagcaaggcccactccatcacaggccgagcggcagagagttttggagctcattcgatcggatgtcacgatatacatagttatcgaacgggtgctttcggtcacacgcatgtcagttgggacgcgagcgaggagaggcgttttccctattgtctgtctgaaacgcgggagcgggaacgacgcagttcgcttacctgtgcaagcatgtagtgcttttttcgagttgaaagctgtcttccatcaatcgcaccgaagctgtagtcgacgggatataaggaagactgcctggcaagggttttgtctgatctgcaattcggctgatcccatcagatcaaattaaggatcatcgagaacagtcccctccctacaccttcttgcctgctcgatcaaagcaacaagatcttccatcaattccgcgtaatcattcaacctaaccgacaaagtctgatcaacacgatgaacgatatgatccccctttcaccgaagacgacttcctctggttgctcgtcctcatcctcttcatcttttcatcagtcctcctcgacatcgtcatcttcgccatgtcgaccacctcgacgcataaacattaccaagtatttcccgcgatacagggaacttctcaagagtcccttgatcgtcagcagaatctcaactccctaccgcacttactcgaacattgacgccggtcacgtcaagcgggatatgggttttggacgatcagctctaccgaggcgaagatcccgacgactgtgagccatatcgactgatggcgaagagatctctgactgatcaagcatccattttgaatacatgcaggcgtagtctcctcgtcgctatcacgctgaccatcgccctcattacgggagccaccctgtacgaccgtatctccgcacaagagtccttgaaatggggcttggacctcgtggtccagtccgcagacctggatccgaaagcgttgttagggtcggaagcgagagggcggttcggagtcaagggaaaggctgcgcaagctttgctggtggaagatcaaggggtcgagtgggaaggccattcggtcgaggtctcagaggtcgatacggtaccaccactcgacatgaccggtcaagagagcgatccggccagccttatcccatcaaagcaatcgggcgagtttgatattccggaacaagcaacgttacctcgtagggcgaacgccaatcgggaagtctacgagatcccagaagaggaacgttggagcctggtcaaggggctacgaaggttggcggagaggatgcctaggagacataaagccgagtaagtagggcagatctggaaggctttttattggagattggtcgaacctgattctttcggctcgacgtcccgtgtctgactcgcagtaaaggaatgaaggaaactcgggcgtggaacatttcccggtataaacggctgcacaattgtctcctcacctcgctcggcgaagagtacctggcgcagacctcttaccttgaattcgacgcggccggcgatgtggtacccgacgaaaagctgaggagtctcggaagttgcaacaaggaagagttgaacgtcgttgtcgggggcacgtttcatttcggtgccagacactttgggcgtgtaagcggagaggatatctggtaagtagctactcgactgttctatcatctcatgaaccacccccgctgacggggaatatctgggtcacagggcaagatccacgatcgactcgtatgaaacgttgggttacacgttcctatatgcgttcgaaatcatcgaatctatggagatcaacctggagatcccatccctcgttcacatggtcatggccgaggcaggacacatcaaagattgcgtgaattggggcgttccgggcaaggagaaaaagttgtcggcccaggatatcaaattgggctcaaaggtcgtccgatgggaggtcgagaatttcgagactggcaaagtgatgatgctcagtaacgccgagtggaaagaaaagggatgggacttcgatgatcccgagttcaacgagacttatcgagcggtaccattcggatttacctggatgttcggccagatcttcagtgacaagccgggaaagctggacaaggcttccccggattacgagccccatgagaactggagatgcgtcaagagtgaagctttcgaagagggactccccatctggaagatgttcgcttggcacttttgggaatctccagcccatccggtgagtctgaagtgatttgctaggtatcgccagagcgagctttcgctaacgcagtttcacatctctcgtagctgggacaccagttcacgctagctcctgaagactacgcgcgatatcctagcctgcaaggaaaagagaacaacctgttcatcggtatgtgccttttgataacggggcatcggcgtgtgatgcgtttgactgatattgatttcgactttcaggctactcgatcgaatcgtattgcgccgatgtgcaacccgaatccgatcgactgcgtcgagcctacattcttgcgaaacacccatcatactttgagcctcctacatacaagtactcggctgacatgttcgagcggatcaagggatcctccgagattgatttcgtggccggtagcggggaacaaggtcagatcttgcccgaccggggcatcgataacatgggcatgttgcctagcgatcgctttgtgcaggagttggggaaaagcagggctttggtgtgagtccatgatcccgcaccgatattcgccaaggagactgacggaaaatcgacgtcgggcgcaattcgtgctagcgggattggcaagcccatcgtcagcccgacaccttatgatgcgctatgcatgggtgtttcgttcatcaacccggtcatgaaatggtcatcggatgcgccggaggatcgttcctcgtggacctgtgagtctccggctggaggcatcacgtttgtagacgatctggaccaatctgacatgaactcgtaccgctcagggcaacatgaaggtctagccaacattgagcctccacacgtctataccgtcgtgagtctctttggctttccccgctgactaatctgcgatatcatactgatttgagcgggatctttttctttttgctcctccacctcgtcatttacctcgcgcttccgcctttcagaaacacggggatgagcccgctttggagcaggccgtctggcaagccgtcaacacccctattgaccgcttcatccgtaagtcgcgaatgtacggttactatgacaacctcactcacccggaacgatgcacgtcgtgcgtgatgtaaaaacagcaccgaccatgtcgacccgagcgaatgatgccagacaccgcgccattgtggatatcgattggagagctgttgccgcatccaagcctctgcctgaagatctggcggtaagtcttctgctataattacttccgtctctctcagctgtccgcgcaagcgctgatttacgggccccgatggcacttggatgcgtttttcgacctacgtagcattgcgcgatgtgatgtgatttttcgaggatttcgaggaggatcagactggcaagccgccacagagggccgaggaaggctcggggctctcgtagagcgatctgagagtggacggtagcaatgcttgcggtatacggcggggacctggttggtagaggctgcctggcagtcgagcgatcgagcgccgactttcccgctccgtccccggagaaaccgatctccggcggccaccgcggaggagatttgttagcgagactttgggcgatttgtacgagcgatcagggtacagggtagcgttacgaagtattcaatcattgatgagcaagccgttcggcttagcaacggcgattacacctgggaagcggttacgcactattcacggccacacggctccgatagtcagccctctgatctcttttccattcataattttagaaatcttcggcgacgatctgtccgtacgagctgcttcaccatcgtaccatgacgccttcatcgtctcgtacgacctcacctccatactctcggccgtatagactcccgtcaccgagtcaccacgagcgatccgagcgagaccgtcggcctagacggagcaacctctcgatcgaacaagccttggcggatagcgaaacagccgctgccgtcgccgcacttacggcggtacaaagtcaaggattctcgcgctctgaggagagagctcactctccagcaaaagacagatcccgagctccgagctctgaacgctcaaccatggacggtcaacacaatcagtatcagtactctgaacagggaaggagtgacatggagacgtctggggtcgccttgggagaggcagatgcgtggggtcaggtaccgcccttccaatacggctcgccgctgaactctctagaggatattcctaattataacaaggcataccaggggttaccggattatggcatgccagggcaagctagcggctcatccatggaggagccgggcaaggtcaagaaacgtaggatcgattcaggaggcattcccggcaggtcgcaagaccacttgcaccagttccatccgcattccaattaccagtccagcagcaattcgactccgcagacccagcatcaacagatgcagcagcgttccatgttcggcgactccgggatcggcaacagtggtaacgaagcggggaaaagcaactctcactcgtacgacgctgaagattctgatccatccgatcctaacgacccgaaacgacgcaaggttcaacgagcatgcgacctgtgtcgacgcaagaagattcgatgcgatggcgcgcactcgtcaaggaggaaccagaaatgcagtaattgtgtcgagagcaagaccgattgcacgtacgtcgaagcggccaagagaagaggtcctccgctggggtacatcgagacgctcgagtggaaagtctcaaagctggaagctctggcacagagagtgagtcccaattgctaaactttcgccaaggcaaagcaccgggagctaatgatacccaattgccttgcattgctagctcaaaccgtcgatcgacttgacgagcgaagtcggaccgatgatctctcgcgattccttcgatctcgacatgttcaagatggctctctcgtctctcgatattccctacactcctccatcgagccggtccaagggttctcgcggtacggtttcaaaagatgcaaactcgcaacgcgaccgcaagaacgtcaagaatggccacgatacgccggatgttagcagaagcaacgctgatggcacagtgggtatgcccatggctcccgaatcatgggaagaggtcaaggcggcttgcaaacagcacatgcaaatctccgtgatggggagcggcaaccaggacccgtctgtcaagacgccggacatgcattggcccactcctgaaggcccgaagaccacctcggctccgaccccgaccaaggaggaagagaaggcgcatgatctcaaagaggaggcagagactcaaaaatttgtcgatcagttgaacggccccaacccatcagaaggatacagatatctaggcaagagctgtaggttatcagtacagcctgcctggaaacggtccccgctaacgtaaaatttcttctggccagctggcgtgcagtttcttcgatcagccatggattacaaagctgctatggcaggggagcctgcaagagctgccgttgactctagacgacttcggtattgggctctgcctatctgggaggcgaccacatctcaacacaacaaccaagccgtggatctctctcgctggcccaaccccgagcttgctcacaccttgatcgaagcctatttcgagcacgacaatatcaccttgccgttactgagtaggatcattttccaaaaggattataacagtgggcgctggagaaaagacacggactttgccaaggtctgcttgctagtatttgcggtcgcttcgagacacgtcgatcatccggatgtctattggcacgccggtgacgaagcagctggccgggccgctagggcggacatggaaatgtatcgacattcggccggttggcgatggatggaagcagtggtcaagacagggaaatcgatactcaaacccgcaaccctggaagatttgcaagtcctgaccgtcagtactgcgtgacgatcccgtgtttcgtgccttcgacctgataccggctacttgacatagctgtgcgccgtatttgccatgcggagtgcggtcttttcgaccgtctgggctgtgactgggatgggattgaagagcgctatcgtgagcgatcgatcctgacctcgttgagattctctttaatttagcatgctctccttgcaggatatcggaatgcacacccgagtggggttgcagcgatgtacatcgattggcgaaggcgaattatacaaaagggcattctgggcacttgttacgctggatagacaaagttgcgcggctatgggaaggacactgtctttgagggacgaagagtcagtagcctgtcgatccattcttacagctgcatacttacacatggaccgattcgacagcttcgacgtcgattatccactggacgttgacgacgagtattgggatacgggcaacccgcagaccgactttgtccaacctgccggcaagaccagcaggatatccatgttcatttcgaccctgcagctaggccgcatcacggcgtttgcgataatgaatgtcgtgagtgtgctgctcgttactgtcggacccagggcgaacaactcctcattcgaagtcccctacagtacactgtcaacaaagctgcccgcggcaaagacgccgaaaatcccgaataccagaagaagcttatagcggatctcgatagcgatctgtatgcttggctggactctgtaccgccgcagttaaaatgggacccagagcgaaaagatccgatctttttccaacagagtgctgtgctatatgccaactattactttgttcaggtatgcattcaccggtgcctaggtcgagcgggacgttcgagctgacttgcatgccgtgaaaccttgtagattttgattcaccggcctttcatcccgactagccggacagcaccgagcgtagcagccttggcgttgccctcgcttgctatttgcaccaacgccgcacgggcgtgtgctcgtatcgtcaacacctcttgtcaaagggacctgatccagcaccatatgtgcatgcctgcgttcacggcggcaatcgtactgttgatcggggtctggggaggcaacaagctaggcgtcggttccgctggagacaagacatcgacattggaagatgtgcgaagttgtctgaggtgtctcaagacgaccgagaggtggtaagttatagtgcctgactcattgcgtgcaatcgatgtcttgaacatttggcccatgtctttaggtggcggggtgcgggacgaatgcgagacattctgatggagcttgccaactggtccgacacgtcgatcgatacgcctactcctggacccagcgcagaacagtaccgcgggagagctatgatgggataccgtacggagccgtcctcgcaacactcttcgcctcaggccatgacaggaggccagctcgcgacgcaggccaagtcggacattggcccggactttgcctctggtggtgacccgaaatcggccgctgctacacgacacatgtctcagccacccatgtctacgggttcgttcacgggcgagccgacctatgttccagaggacgtcactttgccatggtggttcgtctcgcgcgagaacggtttccaaggtctagagggagccgtgagccaccctatgatggcgtctgggtccaacttcggcaacggagcgtcggcgaaccaaaacctcaatgggatggattaccttcccgagatgttcggtggtatgcctccgcctcagaactcgtttggcaaggtccccctcggcccgaacgtgaatcaggtcatgcaaggtaatcgttacccacccatggcggcctttgggcctgaaacaagcggatccatgaatccggggtttggtaacatgccaccacctgcgacaggcacgacccccgcgccgaatgtctcgaacgaattttggtccatgcaggattcgaacgctctggaaatgagcggtgtgcttgcggacatttggagcatggccccatcgacctttgagtgagttgttcacctgtcgactgtttccgcgtcctttttgtgctgacgcctgccttgttcccgatggacaggatggaccagtggtctctttacctgtctcaaccacaacccgccgacgggaccaccaacgcgccccagggctttccacaagaacccttctttgggtagcacctcgctttgttcacccacacacccatcgtcatcgttggattgcaactctataatgtcggattcgtcgcctttgtaccagatcctctcctcacaataccgtgtcagctctcaatgccgcatccatcgtgattctctcgtggcccacatgtctcgaatcgaagtctcgaccgagagaccatggtgactcggtgaggggacagtggctttgatggcgtctcggtgtgtggcgtgatccaaggcgcgacgagcagcgagacgtgaacgggcgtatatttcctcgtcacgatcgctctgcattcggtcgggtcttgttcgctcgggaacgtcatcctacacgaggatccgcagaacttttccgcgctcggggggtttgttccagacttccggcgatcgaggtacgcgtggatacccattcagatcagtttaggcgcaccccatggacggacaaagaaaggaagcacgctcgagcgatgtagggatggttgggatccccccccccctgggacgaccaccgaactctattgttagtctatcttccagtgaactaacattgggatcgcctggtggctttccccgtccctcgtcattcaccagtgggaaacggagcttttgacgtgcacgagcaagcctatggttcacatgcttcgagctcgatgatgatgcatgatgcacagacggaatgaaatcagaggcgcgagatcaagttcaaacaacagtccgcgagcgtccataatgtcgacaacactgcgacaagcgggggaaggtccgaggtgtcagacaattgggcggttcgagaggtggtgtagggtcaggactggcttttctttcttcttacgtctgtctggcagctggcgtgaaggtagagttcgaggtggaccgtggcggatgtcgcacctcgccagactttgtacgtaccagagttcttttctacctgattgcggcttcagatgaacgagtgcggggacatcgaggtcaaacgtggtcggggcagacatgaccaacgatgcgatggagggtatagaagaattctatataacgatgacagatcttggcttgaatcctgttgatcgatggcaaatgtggttctgttcaaattgcaacctccatcgtctgcttcacctagataatctagccgctagataccatagaacgtccctcgcccgacaattttttcgacaatcaccctacctacctcgacacttcacaccgctcgacgcgttcgccggttctctgccgacatcaccatcccatcttgcctacaaatcgcccacaagtcaccgatcctttctcgatcaccccggctgccttcgttaaaacatttccgggcccgtacgcatcgaccccgacatcatatcctagacctcgcgccttgcccgcagtagtgtgagtcgaaggagaaaccccattccaagacgtgaccgtctcgagattatgaggatgtgcttctatcggtctgtctcgcggggaccaggagcgcccaggacgacctagccgcacgacctatgatcctcgagatggtcacgtcgggatcgagaccgcgtctgagacatgaccgagcagtaccgagagatggaatagcttacgtttgcactactctactttactcgccctttttcctgcgcttttccttcgcccttcgccctttgccaacaatcgacacgtcggtacttttccccgtcgcgacctgctggctcctaccacgacgtctcgctccggtggctcgcaacaaactcccgctcgctccctctctctcgcgcgcggccgaattcatttgttcggatcaacctcgcgtcgccctctgccgccgtgcacgcttacgccttatcctaccggggatatccttttgtctcactgcggggattgccgtgctacccgacccccctttgtcgacttcttccgcgctcttctcgcgcctgctctccctttcatcatcaccgacatcacatcacccatctcacctggaacctcctcggaaaatcaaccaacgtcgttgacccgacaacggcatcacgcatcatcaatttcaacaacgtcccgggctctctcgttttactcttaaacggacgatgctgcaaaatcaacgaccttgggttcctttcactcgtcatgttccgcaaccactcgacctcttttcacggattacaacaaaacgacgatcaatccgtatcgcactccaccccctcgcgatcacgctttgttcctacgacgacgtcccttattgttcctcgactcggttaacacgaccccctcggcccaaaacctccctgattcacttccgtagatctcgcaccaactcttcatcaatccaacaaagaaagggtaagtcggatcaatgcctttttggtaccctacgcccgagcccttgcctccatcgaacctatcgtttccccccatccgttccgaccaagtagtgtgggacacttgtgaacctgccaacgtgaaaagcgtccgggcccgttggttcaaccactcttcatcaaagccgagggccgggatcgcaagctatttggaccccacattaatccttcacactcttcgtcgatgggacgaacgctctcccggctactcgcacgacctctacatatcatctcgctcctcttcattgtcacggttctgacatataaacctctacatctcgactcggtctcgacacagacagtctactagaccgacttgaccagttgacgaccggcgatcagacgatagcgaaagaacaagctctcggatagatacacctcggtcttcctttgagacactttaggtatcatatctcgatcatcatccccatcacgcaaccaatcattcaattagctcgatcacactgtgcaatccgcaactcgccataccctcgaaacttaaaccttgacgtccgacaaacactccgctcgtcatcgatacaatctttggtctcgacaaggaagaaaaatccttgaatatctctaaccatggtgagtatatagactgacgatcgacttccaaccgcccctttctacctactgtcggcttgatcgtcagcctcctttcacgcttatcaaagctgactcgacccactcttcctcgcttctagtcctcgaccagcaccactaccactaccaccaccgcgtcatcatcatcgcagcctcccttcatctcgatggaatcttgtcccgccagcccagctttcccctcagtcatgaccggatcagagctcgctcgagagatcagtctgcaagagaaacgaattgcgatcgccctacctcccctttcgccaggacgtttcccagactctcctccttcgacgccgc
